(19) United States
(12) Patent Application Publication
(10) Pub. No.: US 2022/0348934 A1
(43) Pub. Date: Nov. 3, 2022

(54) NON-RIBOSOMAL PEPTIDES AND SYNTHETASES AND METHODS OF PREPARATION AND USE THEREOF

(71) Applicant: VICTORIA LINK LIMITED, Wellington (NZ)

(72) Inventors: David ACKERLEY, Wellington (NZ); Mark CALCOTT, Wellington (NZ)

(73) Assignee: VICTORIA LINK LIMITED, Wellington (NZ)

(21) Appl. No.: 17/642,492

(22) PCT Filed: Sep. 11, 2020
(86) PCT No.: PCT/NZ2020/050102

§ 371 Date: Mar. 11, 2022

(30) Foreign Application Priority Data
Sep. 13, 2019 (AU) 2019903420

(51) Int. Cl. C12N 15/52; C12N 15/62; C12P 21/02

(52) U.S. Cl. CPC C12N 15/52; C12N 15/62; C12P 21/02; C12Y 603/02

(57) ABSTRACT

The present invention encompasses non-ribosomal peptides and non-ribosomal peptide synthetases, and the preparation and use thereof. Specifically encompassed are methods for preparing non-ribosomal peptide synthetases, methods for preparing non-ribosomal peptides from these enzymes, as well as polynucleotides used for producing these enzymes, libraries comprising these polynucleotides, and microbial strains comprising these polynucleotides.

### RELATED APPLICATION

[0001] This application claims priority to Australian patent application number 2019903420, filed 13 Sep. 2019, the entirety of which is hereby incorporated by reference herein.

### FIELD OF THE INVENTION

[0002] The present disclosure relates generally to non-ribosomal peptides and non-ribosomal peptide synthetases, and their preparation and use. More specifically, the present disclosure relates to non-naturally occurring synthetase enzymes for preparing non-ribosomal peptides, as well as means for preparing and using these enzymes.

### BACKGROUND OF THE INVENTION

[0003] Non-ribosomal peptide synthetases (NRPS) are enzymes found in many bacteria and fungi, and are known to catalyse the production of biologically active small peptides from amino acid or related monomer precursors without the need for a nucleic acid template (Finking and Marahiel 2004; Challis and Naismith 2004; Marahiel and Essen 2009). NRPS are very large proteins containing sets of modules, each of which consists of various functional domains such as adenylation (A), condensation (C), cyclization (Cy), thiolation (T), or thioesterase (TE) domains (Marahiel et al. 1997).

[0004] There has been significant interest in generating novel non-ribosomal peptides via recombination of the NRPS genes that encode their biosynthetic machinery. The first attempts to create artificial NRPS enzymes were substitutions of A-T domains into the second and seventh modules of the NRPS involved in the biosynthesis of the lipopeptide surfactin (Stachelhaus et al. 1995). Despite being able to detect modified non-ribosomal peptides using mass spectrometry, in each case the yield of modified lipopeptide was strongly reduced, to only trace levels (Schneider et al. 1998).

[0005] Subsequent research provided evidence that C domains have stringent specificity towards the substrate activated by their cognate A domains (Belshaw et al. 1999; Ehmann et al. 2000). For instance, the work by Belshaw et al provided evidence that the C domain of the second module of tyrocidine biosynthesis (which normally incorporates L-proline) is unable to tolerate leucine or phenylalanine as an acceptor substrate. This stringent specificity towards the acceptor substrate has been used to suggest C and A domains are inseparable, and hence that using fermentation for high-yield production of modified non-ribosomal peptides is not feasible using A domain substitution. This has been the accepted dogma in the field ever since Belshaw et al 1999 and Ehmann et al 2000 were published (e.g., Baltz, 2014; Calcott et al. 2014; Winn et al. 2016; Brown et al. 2018; Baltz 2018; Bozhüyük et al. 2018; Bozhüyük et al. 2019).

[0006] A further difficulty noted in making functional A domain substitutions has been based on the structure of the termination module of SrfA-C (Tanovic et al. 2008). The domains within NRPS enzymes are connected by peptide linkers that have low sequence identity. The linker regions between modules and between A and T domains have previously been used as recombination points for in vitro and in vivo engineering (Doekel and Marahiel, 2000; Mootz et al. 2000; Nguyen et al. 2006, Doekel et al. 2008). However, the structure of SrfA-C solved by Tanovic et al (2008) suggested the linker between C- and A domains is less tolerant for substitution. This structure identified that the linker region located between the C- and A domains forms is well-defined and L-shaped. Within the linker region was an 11-residue helix which was closely associated with the A domain surface. In addition to the well-defined linker region, the C and A domains were found to form a tight interface. The inflexible linker and tight interface were suggested as making it difficult to exchange individual A domains on a broad scale (Tanovic et al. 2008).

[0007] Based on the results related to acceptor site specificity, the structure of NRPS enzymes, and the results of engineering efforts to date, it has been suggested as a rule that C domain specificity or the C/A domain interface cannot be disturbed for functional non-ribosomal peptide production (Nguyen et al. 2006; Tanovic et al. 2008; Baltz, 2014; Calcott et al. 2014; Winn et al. 2016; Brown et al. 2018; Baltz 2018; Bozhüyük et al. 2018; Bozhüyük et al. 2019).

[0008] The inventors have previously found evidence that the C domain exerts a profound effect on substrate incorporation. This was based on recombination of PvdD, the bi-modular NRPS responsible for introduction of two L-Thr residues at the C-terminus of pyoverdine, the major siderophore of P. aeruginosa. When five different synonymous A domains were substituted into PvdD, all generated high levels of a wild type pyoverdine product, whereas nine different non-synonymous A domain substitutions all failed to yield any detectable modified peptide (Ackerley and Lamont, 2004; Calcott et al. 2014). Instead, the only product resulting from a majority of these non-synonymous substitutions was trace amounts of the wild type pyoverdine (i.e., still having two L-Thr residues at the C-terminus), with even conservative substitutions such as L-Ser not being accepted. At the time, this was interpreted as being due to low-level promiscuous activation of L-Thr by the non-synonymous A domains, with strict C domain proof-reading ensuring only this substrate could ultimately be incorporated into the growing peptide (Calcott et al. 2014). To bypass the presumed C domain proof-reading constraints, there were previous attempts at substitution of cognate C-A domain pairings into PvdD. No substitutions were successful within the first module, which was interpreted as being due to disruption of COM-domain sequences necessary for PvdD to associate with PvdJ, the enzyme immediately upstream in the pyoverdine NRPS assembly line (Calcott et al. 2014). Yet, when modifying the second module, it was possible to produce detectable yields of three pyoverdines from a total of ten (seven non-synonymous) recombinant NRPS constructs tested (Calcott et al. 2014; Calcott and Ackerley, 2015).

[0009] In recent experiments, researchers have attempted to bypass the constraints of C domain specificity using A-T-C domains as exchange units. A key condition for substituting these exchange units is that the substrate specificity of the C domain must be respected (Bozhüyük et al. 2018). This means each modified NRPS needs to be individually constructed and makes it difficult to modify enzymes when modules across multiple enzymes, which limits the usefulness of this approach. To bypass these limitations the authors developed a second method in which recombination points were located within the centre of the C domain (Bozhüyük et al. 2019). It was reasoned this would bypass the C domain specificity and allow substitutions to be made in a more generic manner. Using this method to generate a library predicted to produce 48 compounds resulted in the production of 7 of the predicted compounds. However, most of these were produced at low yield. Furthermore, only four modified strains out of fifty strains screened successfully produced modified compounds, i.e., a success rate of only 8%.

[0010] Despite C domain acceptor substrate specificity being a hypothesised barrier to A domain substitution, previous attempts to identify the substrate specificity of C domains using structural information and bioinformatics have been unsuccessful (Bloudoff et al. 2016; Bloudoff and Schmeing 2017; Süssmuth and Mainz 2017; Rausch et al. 2007). In particular, researchers have been unable to solve a crystal structure with the acceptor substrate or use structural information to identify the binding pocket (Brown et al. 2018). Moreover, the most successful NRPS domain substitutions have created only a small number of compounds at a time and therefore there remains a need to generate modified non-ribosomal peptides with a much higher rate of success and yield.

[0011] The present disclosure seeks to address this need or at least to provide the public with a useful alternative.

### SUMMARY OF THE INVENTION

[0012] As described herein, the present inventors have generated novel non-ribosomal peptides with an unprecedentedly high success rate, in two different NRPS systems. In addition, the inventors have constructed non-naturally occurring NRPS with unique and unexpected recombination strategies. These results are highly advantageous and also contradictory to the overriding dogma in the field.

[0013] In general aspects, the present disclosure encompasses non-naturally occurring non-ribosomal peptide synthetase (NRPS) polypeptides, as well as enzymes comprising these polypeptides, polynucleotides encoding these polypeptides, libraries comprising these polypeptides, methods for producing these polypeptides, and methods for producing peptides from these polypeptides.

[0014] In one particular aspect, the invention encompasses a non-naturally occurring non-ribosomal peptide synthetase (NRPS) module, which comprises, in an N-terminal to C-terminal direction: (1) an amino acid sequence from a first NRPS module comprising a C domain from the C1 motif to the C7 motif, joined to (2) an amino acid sequence from a second NRPS module comprising an A domain or a fragment thereof.

[0015] In other aspects:

[0016] The amino acid sequence from the second NRPS module begins at a site 1 to 24 amino acids, or 1 to 14 amino acids, following the terminal helix of the C domain of the first NRPS module.

[0017] The amino acid sequence from the second NRPS module comprises an A domain of the second NRPS module, the A domain encompassing the linker helix to the A10 motif.

[0018] The amino acid sequence from the second NRPS module begins at a site within the terminal helix of the C domain of the first NRPS module.

[0019] The amino acid sequence from the second NRPS module begins at a site within the linker helix of the A domain of the first NRPS module.

[0020] The amino acid sequence from the second NRPS module begins at a site between the terminal helix of the C domain of the first NRPS module and linker helix of the A domain of the first NRPS module, inclusive.

[0021] The amino acid sequence from the second NRPS module begins at a site immediately following the C-terminus of the terminal helix of the C domain of the first NRPS module.

[0022] The amino acid sequence from the second NRPS module begins at a site immediately preceding the N-terminus of the linker helix of the A domain of the first NRPS module.

[0023] The amino acid sequence from the second NRPS module begins at a site immediately preceding the C-terminus of the linker helix of the A domain of the first NRPS module.

[0024] The amino acid sequence from the second NRPS module ends at a site preceding the first helix of the T domain of the first NRPS module.

[0025] The amino acid sequence from the second NRPS module ends at a site in the first NRPS module encompassing: the residue immediately following the A domain binding pocket to 20 residues following the A10 motif.

[0026] The amino acid sequence from the second NRPS ends at a site in the first NRPS module encompassing: the residue immediately following the A domain binding pocket to 10 residues following the A10 motif.

[0027] The first NRPS module and the second NRPS module have different substrate specificity.

[0028] The A domain of the first NRPS module and the A domain of the second NRPS module share less than 40%, less than 50%, less than 60% or less than 70% amino acid sequence identity.

[0029] The C domain of the first NRPS module and the C domain of the second NRPS module share less than 40%, less than 50%, less than 60% or less than 70% amino acid sequence identity.

[0030] The region intervening the A domain and the C domain of the first NRPS module and the region intervening the A domain and the C domain of the second NRPS module share less than 40%, less than 50%, less than 60% or less than 70% amino acid sequence identity.

[0031] The A domain binding pocket of the second NRPS module differs from the A domain binding pocket of the first NRPS module by 1 or more amino acids.

[0032] The A domain binding pocket of the second NRPS module differs from the A domain binding pocket of the first module by 2 or more, 3 or more, 4 or more, 5 or more, 6 or more, 7 or more, or 8 amino acids.

[0033] The one or more different amino acids in the A domain of the second NRPS module are one or more of the eight amino acids that determine the specificity of the A domain.

[0034] The downstream to amino acid sequence from the second NRPS module includes a C-terminal sequence from the first NRPS module.

[0035] The C-terminal sequence comprises a domain from the first NRPS module.

[0036] The downstream to amino acid sequence from the second NRPS module includes a C-terminal sequence from a third NRPS module.

[0037] The C-terminal sequence comprises a domain from the third NRPS module.

[0038] In yet other aspects:

[0039] The non-naturally occurring non-ribosomal peptide synthetase (NRPS) module has enzymatic activity.

[0040] As particular aspects:

[0041] The invention encompasses an enzyme comprising the non-naturally occurring NRPS module of any one of the preceding aspects.

[0042] The invention encompasses a polynucleotide comprising a nucleic acid sequence encoding the non-naturally occurring NRPS module of any one of the preceding aspects.

[0043] The invention encompasses a nucleic acid construct comprising a nucleic acid sequence encoding the non-naturally occurring NRPS module of any one of the preceding aspects.

[0044] The invention encompasses a library of nucleic acid constructs, wherein a nucleic acid construct in the library encodes a non-naturally occurring NRPS module of any one of the preceding aspects.

[0045] The invention encompasses a host cell comprising a nucleic acid construct of any one of the preceding aspects.

[0046] The invention encompasses a method for generating the non-naturally occurring NRPS module of any one of the preceding aspects.

[0047] The invention encompasses a method for production of a non-ribosomal peptide, the method comprising culturing the host cell according to a preceding aspect to produce the non-ribosomal peptide.

[0048] The invention encompasses a method for the production of a non-ribosomal peptide, the method comprising the use of the non-naturally occurring NRPS module of any one of the preceding aspects, the nucleic acid construct according to a preceding aspect, the library according to a preceding aspect, or the host cell according a preceding aspect.

[0049] The invention encompasses a kit comprising the non-naturally occurring NRPS module of any one of the preceding aspects, the nucleic acid construct according to a preceding aspect, the library according to a preceding aspect, or the host cell according a preceding aspect Novel features that are believed to be characteristic of the invention will be better understood from the detailed description of the invention when considered in connection with any accompanying figures and examples. However, the figures and examples provided herein are intended to help illustrate the invention or assist with developing an understanding of the invention; these are not intended to limit the invention's scope.

### BRIEF DESCRIPTION OF THE DRAWINGS

[0050] FIG. 1: Alignment of the amino acid sequences of the second module of PvdD (SEQ ID NO: 1) and the first module of TycB (SEQ ID NO: 2). The regions encoding the C, A and T domains are annotated along with the conserved motifs according to Marahiel et al (1997) and position of the terminal helix of the C domain. The region corresponding to the linker helix found to be associated with the A domain by Tanovic et al (2008) is also highlighted.

[0051] FIGS. 2A-B: A) Amino acid sequence alignment of the C domain from the second module of PvdD (regions 1-3; SEQ ID NO:122-124), and the C domain from the first module of PvdJ (regions 1-3; SEQ ID NO:125-127). The alignment is separated into three regions based on the highlighted low homology stretches. B) Homology model of the C domain from the second module of PvdD. The conserved histidine residue and residues differing between the Lys and Thr C domains from panel A are shown as sticks.

[0052] FIGS. 3A-B: A) Semi-rational shuffling approach used to narrow down substrate specificity regions. The three variable regions of the C domains from the Lys-specific module (solid boxes) and the Thr-specific module (empty boxes) were shuffled in every possible combination to create eight C domains. These were inserted into the plasmid pDEC-Lys. B) Pyoverdine production from strains containing shuffled C domains as assessed by measuring absorbance at 400 nm relative to a wild-type P. aeruginosa strain. Error bars represent the standard deviation from six independent replicates.

[0053] FIGS. 4A-B: A) Homology models showing the conserved catalytic histidine residue and residues modified within the third region of the C domain as spheres. B) Levels of pyoverdine production from strains containing modifications to the third variable region of the C domain. Production was assessed by measuring absorbance at 400 nm relative to a wild-type P. aeruginosa strain. Error bars represent the standard deviation from six independent replicates.

[0054] FIG. 5: Pyoverdine yield of strains containing C-A domain substitutions versus strains containing linker plus A domain substitutions. Production was assessed by measuring absorbance at 400 nm relative to a wild-type P. aeruginosa strain. Error bars represent the standard deviation from six independent replicates.

[0055] FIGS. 6A-B: A) Levels of pyoverdine production resulting from nine A domain substitutions into the second module of PvdD, as measured by absorbance at 400 nm. Error bars represent the standard deviation from six independent replicates. B) Mass spectra showing the production of modified pyoverdines.

[0056] FIG. 7: NRPS modules used as a source of sequences for phylogenetic analysis. Modules are from NRPS pathways involved in the biosynthesis of pyoverdine from i) P. aeruginosa PAO1, ii) P. syringae pv. phaseolicola 1448A, iii) P. putida KT2440 and iv) P. fluorescens SBW25. The substrate specificity and name of each module are located below the NRPS schematic. Modules within the same pathway exhibiting the same substrate specificity are labelled A to J.

[0057] FIGS. 8A-C: A) Maximum likelihood phylogenetic tree of the C domains from the modules shown in panel A. Domains are labelled according to the names in panel A and shaded according to the substrate specificity of the corresponding A domain. Letters A to J indicate modules having the same substrate specificity within the same pathway. B) Maximum likelihood phylogenetic tree of the A domains from the modules shown in panel A. Shading and labelling is identical to panel B. C) Key showing the shading used to indicate substrate specificity in panels B and C.

[0058] FIGS. 9A-B: A) Phylogenetic compatibility matrices of alignments of C-A-T domains from Pseudomonas, Bacillus and Streptomyces species showing frequencies of phylogeny violations for each pairwise comparison of sequence fragments. A bootstrap value of 70% was used to calculate phylogenetic violations. B) Segregation of alignments by consensus substrate specificity. The segregation score was calculated using a 0%, 50% and 70% bootstrap cut off. The locations of key conserved motifs are indicated along the top of the graph. Shaded blocks have been added to aid comparison between regions of interest.

[0059] FIG. 10: Recombination hotspot analysis of C-A-T domains from Pseudomonas, Bacillus and Streptomyces species. ‘X’ marks the location of recombination found to allow the successful Lys A domain substitution. Dark and light grey areas indicate local breakpoint hotspots at the 95% and 99% confidence level, and the two horizontal lines indicate cut-offs for global breakpoint hotspots at the 95% and 99% confidence level.

[0060] FIGS. 11A-B: A) Pyoverdine production of partial A domain substitutions as measured by absorbance at 400 nm. Error bars represent the standard deviation from three independent replicates. B) The average number of clashes calculated using SCHEMA which were introduced by recombination of 9 modules with the domains from the second module of PvdD. The dark shaded region of the graph indicates 1 standard deviation. Lines labelled 1 to 6 show the approximate locations of substitutions tested in Panel A.

[0061] FIGS. 12A-C: A) Diagram representing the upstream recombination points tested for A domain substitution. ‘X’ refers to the site originally identified, and ‘A’ to ‘D’ represent the additional sites tested. B) Pyoverdine production of previous C-A domain substitutions (Calcott and Ackerley, 2015) and two additional strains expressing pvdD constructs bearing Gly or Phe CA domain substitutions, in comparison with the A domain substitutions using the upstream sites identified in Panel A. Levels of pyoverdine were measured by optical density at 400 nm. Error bars represent the standard deviation from three independent replicates. C) Diagram highlighting the recombination points used showing the recombination points tested using PvdD in panel B. ‘X’ and ‘A’ to ‘D’ sites are described for Panel A, above. The equivalent sites are identified in module 1 of TycB by sequence alignment. The dashed black rectangle indicates the preferred recombination region bounded by the N-terminus of the terminal helix of the C domain and the C-terminus of the linker helix of the A domain. The smaller solid black rectangle indicates the more preferred recombination sites bounded by the C-terminus of the terminal helix and the N-terminus of the linker helix.

[0062] FIGS. 13A-D: A) A diagram representing the NRPS enzymes used to make the cyclic Phe-Pro dipeptide. B) HPLC analysis showing production of the cyclic Phe-Pro dipeptide by the inventors labelled 1, in comparison to a cyclic Phe-Pro standard. Quantification was performed based on 3 independent replicates. C) A diagram representing the NRPS enzymes used to make a linear Phe-Leu dipeptide. D) HPLC analysis showing production of the Phe-Leu dipeptides labelled 2-6, in comparison to a Phe-Leu standard. Quantification was performed based on 3 independent replicates.

[0063] FIG. 14: Relative levels of pyoverdine production from strains expressing pvdD constructs bearing four additional A domain substitutions at the X, B or D sites identified in FIG. 12A. Levels of pyoverdine were measured by optical density at 400 nm. Error bars represent the standard deviation from three independent replicates.

[0064] FIG. 15: HPLC analysis showing production of D-Phe-L-Leu dipeptides resulting from A-domain substitutions at the X, B or D sites in the PheAT-ProCATTe dimodular system, using the three Leu-specifying A domains labelled 2, 3 and 5 for TycC6, SrfAC and NZ_CP020028.1.cluster004, respectively.

[0065] FIGS. 16A-B: A) Diagram highlighting the downstream recombination points, D1 to D7 and A10 located downstream of the conserved A10 motif. Sites are identified in module 2 of PvdD and module 1 of TycB by sequence alignment. B) Pyoverdine production of A domain substitutions using downstream sites D1 to D7 identified in panel A, in comparison to the previously used A10 site. Each substitution was generated in combination with the upstream B site. Levels of pyoverdine production were measured by optical density at 400 nm. Asterisks indicate strains in which the modified pyoverdine predicted by the substituted A domain was detected by MALDI mass spectrometry. Error bars represent the standard deviation from three independent replicates.

### DETAILED DESCRIPTION OF THE INVENTION

[0066] The following description sets forth numerous exemplary configurations, parameters, and the like. It should be recognised, however, that such description is not intended as a limitation on the scope of the present invention; it is instead provided as a description of exemplary embodiments.

### Definitions

[0067] Throughout the specification and claims, the following terms take the meanings explicitly associated herein, unless the context clearly dictates otherwise.

[0068] The various examples, embodiments, and aspects as set out herein may be readily combined, without departing from the scope or spirit of the invention. Thus, the phrase “in one example”, “in one embodiment”, or “in one aspect” is not necessarily exclusive of other examples, embodiments, or aspects that are also described. In the same way, the phrase “in another example”, “in another embodiment”, or “in another aspect” is not necessarily exclusive of other examples, embodiments, or aspects that are described.

[0069] In each instance herein, in descriptions, embodiments, and examples of the present invention, the terms “comprising”, “including”, etc, are to be read expansively, without limitation. Thus, unless the context clearly requires otherwise, throughout the description and the claims, the words “comprise”, “comprising”, and the like are to be construed in an inclusive sense as to opposed to an exclusive sense, that is to say in the sense of “including but not limited to”.

[0070] Where a range is given in the specification, for example, a temperature range, a time range, or a composition range, all intermediate ranges and subranges, as well as all individual values included in the ranges given are intended to be included in the disclosure. Thus, each range that is specified (e.g., 1 to 10) includes all possible combinations of numerical values between the lowest value and the highest value enumerated (e.g., 1, 1.1, 2, 3, 3.3, 4, 5.5, 6, 7, 8.9, 9 and 10) and also any range of rational numbers within that range (e.g., 2 to 8, 1.5 to 5.5, and 3.1 to 4.9), and, therefore, all sub-ranges of all ranges expressly disclosed herein are hereby expressly disclosed. The numeric values provided in parentheses here are only examples of what is specifically intended and all possible combinations of numerical value between the lowest value and the highest value enumerated are to be considered to be expressly stated in this disclosure in a similar manner.

[0071] As used herein “and/or” means additionally or alternatively.

[0072] As used herein “based on” is not exclusive and allows for being based on additional factors not described, unless the context clearly dictates otherwise. The meaning of “in” includes “in” and “on.”

[0073] Any use of a term in the singular also encompasses plural forms. Thus, throughout the specification, the meaning of “a”, “an”, and “the” include plural references.

[0074] The term “about” or “approximately” means up to 10% greater than or up to 10% lesser than a particular value.

[0075] As used herein, an “isolated” component (e.g., isolated peptide or isolated enzyme) refers to a component that has been purified from (e.g., separated from) other components. An isolated component may have: about 70% purity or greater, about 80% purity or greater, about 90% purity or greater; or, in particular aspects, about 99% purity or greater. An isolated component may be obtained by any method or combination of methods as known and used in the art, including biochemical, recombinant, and synthetic techniques.

[0076] “Isolated” as used herein with reference to polynucleotide, peptide, or polypeptide sequences describes a sequence that has been removed from its originating environment, e.g., natural cellular environment or synthetic environment. The polynucleotide, peptide, or polypeptide sequences of this disclosure may be prepared by at least one purification step.

[0077] “Isolated” when used herein in reference to a cell or host cell describes to a cell or host cell that has been obtained or removed from an organism or from its natural environment and is subsequently maintained in a laboratory environment as known in the art. The term encompasses single cells, per se, as well as cells or host cells comprised in a cell culture and can include a single cell or single host cell.

[0078] The term “construct”, e.g., “genetic construct”, refers to a polynucleotide molecule, usually double-stranded DNA, which may have cloned or inserted into it another polynucleotide molecule. For example, a construct may have an unidentified polynucleotide insert that is prepared from an environmental sample or as a cDNA, but not limited thereto. A construct may contain the necessary elements that permit transcription of a cloned or inserted polynucleotide molecule, and, optionally, for translating the transcript into a peptide or polypeptide. The inserted polynucleotide molecule may be derived from the host cell, or may be derived from a different cell or organism. Once inside the host cell the construct may become integrated in the host chromosomal DNA. The construct may be linked to a vector.

[0079] The term “vector” as used herein refers to a polynucleotide molecule, usually double stranded DNA, which is used to replicate or express a construct. The vector may be used to transport a construct into a given host cell.

[0080] The term “polynucleotide(s),” as used herein, means a single or double-stranded deoxyribonucleotide or ribonucleotide polymer of any length, and include as non-limiting examples, coding and non-coding sequences of a gene, genomic DNA, recombinant polynucleotides, isolated and purified naturally occurring DNA or RNA sequences, synthetic RNA and DNA sequences, fragments, constructs, and vectors. Reference to nucleic acids, nucleic acid molecules, nucleotide sequences, and polynucleotide sequences is to be similarly understood.

[0081] The term “polypeptide”, as used herein, encompasses amino acid chains of any length, wherein the amino acid residues are linked by covalent peptide bonds. “Polypeptide” may refer to a polypeptide that is a purified natural product, or that has been produced partially or wholly using recombinant or synthetic techniques. The term may refer to an aggregate of a polypeptide such as a dimer or other multimer, a fusion polypeptide, a polypeptide fragment, a polypeptide variant, modification, fragment, or derivative thereof. The term “polypeptide” is used interchangeably herein with the terms “peptide” and “protein”.

[0082] A “fragment” of a polypeptide is a subsequence of a particular polypeptide. In certain aspects, the fragment is a functional fragment. A functional fragment performs a function that is required for a biological activity or binding and/or provides three dimensional structure of the polypeptide. The term may refer to a polypeptide fragment, an aggregate of a polypeptide fragment, a fusion polypeptide fragment, a fragment of a polypeptide variant or modification, or a fragment of a polypeptide derivative thereof that is capable of performing the polypeptide activity.

[0083] The term “full length” as used herein with reference to a sequence means a peptide or polypeptide that comprises a contiguous sequence of amino acid residues where each amino acid residue has been expressed from each of its corresponding codons in the polynucleotide over the entire length of the coding region and resulting in a fully functional polypeptide, peptide, or protein. As will be appreciated by a person of ordinary skill in the art, a “full length” sequence contains the amino acid sequence that corresponds to and has been expressed from each and every codon encoded by the polynucleotide comprising the entire coding region of the polypeptide, wherein each of said codons is located between the start codon and the termination codon normally associated with that coding region.

[0084] The term “expressing” refers to the expression of a nucleic acid transcript from a nucleic acid template and/or the translation of that transcript into a peptide or polypeptide, and is used herein as commonly used in the art.

[0085] The term “incubating” refers to the placing together of elements so they may interact and is used herein as commonly used in the art.

[0086] The term “endogenous” as used herein refers to a constituent of a cell, tissue or organism that originates or is produced naturally within that cell, tissue or organism. An “endogenous” constituent may be any constituent including but not limited to a polynucleotide, a polypeptide, or a peptide, including a non-ribosomal peptide, but not limited thereto.

[0087] The term “exogenous” as used herein refers to any constituent of a cell, tissue or organism that does not originate or is not produced naturally within that cell, tissue or organism. An exogenous constituent may be, for example, a polynucleotide sequence that has been introduced into a cell, tissue or organism, or a peptide or polypeptide expressed in that cell, tissue or organism from that polynucleotide sequence.

[0088] “Naturally occurring” as used herein with reference to a polynucleotide or polypeptide sequence according to the invention refers to a sequence that is found in nature. A synthetic sequence that is identical to a wild-type sequence is, for the purposes of this disclosure, considered a naturally occurring sequence. A naturally occurring sequence also refers to a variant sequence as found in nature that differs from wild-type. For example, allelic variants and naturally occurring sequences due to hybridization or horizontal gene transfer, and variants arising out of other natural processes. What is important for a naturally occurring sequence is that the actual sequence (e.g., nucleotide or amino acid sequence) is found or known from nature.

[0089] “Non-naturally occurring” as used herein with reference to a polynucleotide or polypeptide sequence according to the invention refers to a sequence that is not found in nature. Examples of non-naturally occurring sequences include artificially produced and variant sequences, made for example by recombination, domain swapping, point mutation, insertion, deletion, or other methods, or combinations of these methods. Non-naturally occurring sequences also include chemically evolved sequences. What is important for a non-naturally occurring sequence according to the invention is that the actual sequence (e.g., nucleotide or amino acid sequence) is not found or known from nature.

[0090] The term, “wild-type” when used herein with reference to a polynucleotide refers to a naturally occurring, non-mutant form of a polynucleotide, peptide, polypeptide, or organism. A wild-type peptide or polypeptide is capable of being expressed from a wild-type polynucleotide. In one embodiment, a wild-type polypeptide is a wild-type NRPS polypeptide that is expressed from a wild-type polynucleotide.

[0091] “Homologous” as used herein with reference to polynucleotide regulatory elements, means a polynucleotide regulatory element that is a native and naturally-occurring polynucleotide regulatory element. A homologous polynucleotide regulatory element may be operably linked to a polynucleotide of interest such that the polynucleotide of interest can be expressed from a, vector, construct, or expression cassette according to the invention.

[0092] “Heterologous” as used herein with reference to polynucleotide regulatory elements, means a polynucleotide regulatory element that is not a native and naturally-occurring polynucleotide regulatory element. A heterologous polynucleotide regulatory element is not normally associated with the coding sequence to which it is operably linked. A heterologous regulatory element may be operably linked to a polynucleotide of interest such that the polynucleotide of interest can be expressed from a vector, construct, or expression cassette according to the invention. Such promoters may include promoters normally associated with other genes, ORFs or coding regions, and/or promoters isolated from any other bacterial, viral, eukaryotic, or mammalian cell.

[0093] The term “recombinant” refers to a polynucleotide sequence that is removed from sequences that surround it in its natural context and/or is recombined with sequences that are not present in its natural context. A “recombinant” peptide or polypeptide sequence is produced by translation from a “recombinant” polynucleotide sequence.

[0094] As used herein, the term “variant” refers to polynucleotide, peptide, or polypeptide sequences different from the specifically identified sequences, wherein one or more nucleotides or amino acid residues is deleted, transposed, substituted, or added. Variants may be naturally occurring allelic variants, or non-naturally occurring variants. Variants may be from the same or from other species and may encompass homologues, paralogues, and orthologues. In certain embodiments, the variants useful in the invention have biological activities that are the same or similar to those of a corresponding wild-type molecule; i.e., functional variants of the parent peptide, polypeptide, or polynucleotide. In certain embodiments, the variants have biological activities that differ from their corresponding wild-type molecules. In certain embodiments, the differences are altered activity and/or binding specificity. For example, a functional NRPS polypeptide variant may produce a particular peptide. In certain embodiments, the levels of NRP produced by the functional variant may be higher or lower than produced by the wild-type NRPS polypeptide.

[0095] The term “variant” with reference to polynucleotides, peptides, and polypeptides encompasses all forms of polynucleotides, peptides, and polypeptides as defined herein.

[0096] As used herein, the term “mutagenesis” refers to methods to alter a polynucleotide sequence either in vitro or in vivo, most commonly to change the sequence of one or more polypeptides encoded therein. Mutagenesis methods include as non-limiting examples, error-prone PCR, DNA shuffling, chemical mutagenesis, application of ultraviolet radiation, genome shuffling, and use of mutator strains. In one application, mutagenesis may be followed by high-throughput screening to enable recovery of improved variants, for example strains of bacteria that as a consequence of mutagenesis now exhibit increased levels of production of glutamine or an analogue thereof.

[0097] As used herein, the term in vitro refers to a reaction performed outside of the confines of a living cell or a host organism.

[0098] As used herein, the term in vivo refers to a reaction performed within a living cell and/or within a host organism.

[0099] The term “high throughput screening” as used herein refers to a significant increase in number of results that can be generated by a given method, in comparison to other methods used to generate the same, or same type of results. For example, methods may be used to screen about 50, about 75, about 100, about 250, about 500, about 1000, or about 10,000 to about 100,000 candidates per day, or at least 50 candidates per day, at least 50 candidates per day, at least 75 candidates per day, at least 100 candidates per day, at least 250 candidates per day, at least 500 candidates per day, at least 1000 candidates per day, at least 10,000 candidates per day, at least 100,000 candidates per day, but not limited thereto.

[0100] “Activation” refers to any action or change that causes a substrate to adopt a functional conformation or perform a functional role that the substrate was not capable of performing before being activated. For example, an NRPS polypeptide as described herein may be considered a substrate that is activated by a PPTase. An NRPS is considered “activated” for the purposes of the invention, when it has had a 4′-phosphopantetheine (4′-PP) cofactor attached by a PPTase. Activation of an NRPS polypeptide means the same thing.

[0101] The term “non-ribosomal peptide synthetase” (NRPS) refers to a biosynthetic enzyme that catalyses the addition of a constituent to a non-ribosomal peptide, for example an amino acid constituent. NRPS are exemplified by synthetase enzymes, for example, bacterial synthetase enzymes, including Bacillus (e.g., Brevibacillus), Pseudomonas, and Streptomyces synthetase enzymes. Also noted are Burkholderia, Xenorhabdus, and Photorhabdus enzymes. Soil dwelling bacterial strains and their NRPS are particularly noted. Exemplifications include but are not limited to: enzymes that synthesise protease or proteasome inhibitors, for example, 20S proteasome inhibitors, as well as enzymes that synthesise siderophores, and enzymes that synthesise antibiotic peptides, and any modifications of these, as described in detail herein.

[0102] The term “modified NRPS” refers to an NRPS that is not a naturally occurring variant of a wild-type NRPS. In the same way, a “modified NRPS polypeptide” refers to a NRPS polypeptide that is not a naturally occurring variant of a wild-type NRPS polypeptide. Modification may be carried out in accordance with the disclosed methods. For example, various methods of recombination may be used to achieve modification. Modified NRPS and NRPS polypeptides useful in the invention may have biological activities that are the same or similar to those of a corresponding wild-type molecule i.e., functional modifications. Alternatively, modified NRPS and NRPS polypeptides may have biological activities that differ from their corresponding wild-type molecules. In certain embodiments, the differences are altered activity and/or binding specificity. For example, a functional modification may produce a particular NRP. In certain embodiments, the levels of NRP produced by the functional modification may be higher or lower than produced by the wild-type molecule. In particular embodiments, a modified NRPS may comprise a recombinant NRPS, a modified NRPS polypeptide may comprise a recombinant NRPS polypeptide, and a modified NRPS module may comprise a recombinant NRPS module, as set out in this description.

[0103] The term “non-ribosomal peptide” (NRP) refers to biologically active small peptides or molecules derived from biologically active small peptides that are synthesised by non-ribosomal peptide synthetases (NRPS) from amino acid precursors wherein the non-ribosomal peptide itself is not directly encoded by a polynucleotide template. NRPs are exemplified by siderophores such as pyoverdines; antibiotics such as tyrocidines and gramicidins, e.g., Gramicidin S; protease or proteasome inhibitors such as eponemycin, epoxomicin, and syrbactins, e.g., syringolin and glidobactin, and any variants of any of the above, as described in detail herein.

[0104] The terms “A domain”, “C domain”, “T domain”, and “TE domain” as used herein refer to peptide domains that can be defined as regions of amino acid sequence within NRPS enzymes that contain a majority of the motif sequences for each domain type as defined by Marahiel et al. 1997. Reviewed in Süssmuth and Mainz 2017. The term “T domain” refers to the NRPS domain that is the site of attachment of the 4′-PP cofactor, as above. The term T domain is used interchangeably with peptidyl carrier protein domain (PCP domain) and carrier protein domain (CP domain). Multiple domains can be combined to make an NRPS “module”.

[0105] A “modified A domain” refers to an A domain with one or more sequence modification as described herein. For example a modified domain may have one or more linker sequence upstream from the domain sequence, one or more linker sequence downstream from the domain sequence. In certain embodiments, an A domain or fragment thereof from a first NRPS module is substituted with the A domain or fragment thereof from a second NRPS module. Accordingly, A domain substitutions are included as modified A domains. Exemplifications of modified NRPS domains are set out in detail herein.

[0106] The term “A domain binding pocket” refers to the configuration of amino acids within the active site of an A domain of an NRPS polypeptide. The binding pocket defines the substrate specificity of the A domain (Stachelhaus et al, 1999; Challis et al, 2000). Substrate specificity will have been established, or can be determined experimentally. See, e.g., Khayatt et al. 2013. The term “A domain coding residues” refers to the specific identities of the eight amino acids that determine the specificity of a particular A domain. These were identified by Stachelhaus et al (1999) as residues Ala236, Trp239, Thr278, Ile299, Ala301, Ala322, Ile330 and Cys331 of PheA. The corresponding residues can be determined by sequence alignment to PheA or by using software packages including but not limited to 2MetDB.

[0107] It is understood that, for any DNA molecule disclosed herein, the corresponding RNA molecule and peptide/polypeptide molecules are also encompassed and disclosed. Likewise, for any peptide/polypeptide molecule disclosed herein, the corresponding RNA and DNA sequences are also considered to be encompassed and disclosed. In addition, where there are multiple sequence identifiers, e.g., “SEQ ID NO: 122-127”, this format may be understood as referring to each sequence individually, or any combination thereof.

### NRP and NRPS Polypeptides

[0108] Non-ribosomal peptides (NRPs) are a class of small peptide natural products synthesised mainly by bacteria and fungi. Despite their small size, they are highly diverse in terms of the monomers that can be incorporated. As of 2014 there were 1164 different non-ribosomal peptides known (Caradec et al. 2014), which collectively contain over 500 unique monomers, including both proteinogenic and non-proteinogenic L- and D-amino acids, as well as carboxylic acids and amines (Caboche et al. 2010). Non-ribosomal peptides also exhibit high structural diversity with only 27% being linear; the remainder having cyclic, branched or other complex primary structures (Caboche et al. 2010).

[0109] The diversity of non-ribosomal peptides imparts on them many properties of relevance to biotechnology; for example, peptides have been identified with antibiotic, antiviral, anti-cancer, anti-inflammatory, immunosuppressant and surfactant qualities (Sieber and Marahiel 2005; Felnagle et al. 2008). Importantly for medicine, natural products often need to be modified to improve clinical properties and/or bypass resistance mechanisms (Bush 2012; O'Connell et al. 2013). Due to their typically complex structures, most clinical natural product derivatives are created by means of semisynthesis; a process whereby the natural product is chemically modified post-isolation from biological sources (Kirschning and Hahn 2012; O'Connell et al. 2013). An alternative synthetic strategy, which would also open up a wide range of structural diversity, is the use of protein engineering to modify the genetic templates that specify these natural products. Non-ribosomal peptides have a modular mode of synthesis, which makes them potentially amenable to rational manipulation at the genetic level. However, to date most attempts to achieve this have yielded a biosynthetic machinery that is either greatly impaired in its activity, or completely non-functional.

[0110] Non-ribosomal peptide synthesis generally follows the multiple template model, originally proposed by Stein et al. (1994). According to this model, peptides are synthesised in a modular assembly line-like manner by NRPS enzymes (“the template”). The modules that comprise an NRPS template may be clustered on a single enzyme or located within multiple distinct enzymes that associate post-translation; and are classified as either initiation, termination, or elongation modules depending on their location in the assembly line. Modules act in a concerted but semi-autonomous fashion, and are defined by their ability to recognise, activate and incorporate a specific monomer into the final peptide product (Hur et al. 2012).

[0111] Within each module of an NRPS, an adenylation (A) domain recognises and activates a specific substrate by addition of AMP. The activated substrate is then tethered to a flexible 4′-phosphopantetheine (PPT) prosthetic group, which is itself covalently attached to a thiolation (T) domain (also known as a peptidyl carrier protein (PCP) domain). The T domain lies at the heart of the biosynthetic process, with its flexible PPT prosthesis effectively the “swinging arm” of a biomolecular assembly line that transfers peptide intermediates between different domains and modules. Post-attachment of an activated substrate by its A domain partner, a T domain then passes that substrate to a condensation (C) domain, which catalyses peptide bond formation between the donor substrate provided by the T domain immediately upstream, and the acceptor substrate provided by the downstream T domain.

[0112] Following the initial condensation event, the process can repeat in an iterative fashion, with the previous peptide intermediate now serving as the donor substrate for the C domain of the next module in an NRPS complex. Along the way, certain modules may contain additional tailoring domains that modify individual substrates in a directed fashion (e.g., epimerisation (E) domains, for conversion from L- to D-enantiomers). The growing peptide continues to be passed from the T domain of one module to the T domain of the next until the product is released, typically via a hydrolysis or intramolecular cyclisation reaction catalysed by a thioesterase (TE) domain associated with the final module in an NRPS complex.

[0113] The gram-negative bacteria Pseudomonas aeruginosa produces two major siderophores. One is pyochelin (Pch), which is a derivative of salicylic acid (Cox et al. 1981), and the other is pyoverdine (Pvd) (Ankenbauer et al. 1985). P. aeruginosa strains produce several pyoverdine peptides, which can be classified into three types (PvdI to PvdIII) and can be distinguished by their amino acid sequences (Meyer et al. 1997). For pyoverdine sequences, the peptide and the chromophore are derived from amino acid precursors that are assembled by non-ribosomal peptide synthetases (NRPSs), with other enzymes catalysing additional reactions to complete the maturation of the pyoverdine peptides (Ackerley et al. 2003; Beare et al. 2003; Cunliffe et al. 1995; Handfield et al. 2000; McMorran et al. 2001; McMorran et al. 1996; Miyazaki et al. 1995; Visca et al. 1994).

[0114] Pyoverdines comprise an (1S)-5-amino-2,3-dihydro-8,9-dihydroxy-1H-pyrimido[1,2-a]quinoline core, and can include a 6- to 12-amino acids chain (Meyer, 2000; Ravel and Cornelis, 2003). In Pseudomonas aeruginosa strain PAO1, pyoverdine peptide synthesis involves four NRPS (Georges and Meyer 1995), PvdL, PvdI, PvdJ and PvdD, which direct the synthesis of a pyoverdine precursor peptide of 11 amino acids with the sequence L-Glu-L-Tyr-D-Dab-L-Ser-L-Arg-L-Ser-L-fOHOrn-L-Lys-L-fOHOrn-L-Thr-L-Thr and with the second and third amino acids of the peptide (L-Tyr and D-Dab-D-amino butyric acid-) forming the chromophore (see, e.g., Georges and Meyer 1995; Lehoux et al. 2000; Demitris et al. 2002; Ackerley et al. 2003; Lamont et al. 2003).

[0115] The soil bacterium Brevibacillus brevis produces an antibiotic composition known as tyrocidine. This is made as part of a mixture called tyrothricin, consisting of tyrocidine and the linear pentadecapeptide gramicidin. Tyrocidine itself is a mixture of at least four known structural variants. Tyrocidine A, the most prominent of these, is a cyclic decapeptide with the primary structure (-DPhe-Pro-Phe-DPhe-Asn-Gln-Tyr-Val-Orn-Leu-) cyclic, where the indicated amino acids are the unusual D-isomer and Orn is the unusual amino acid ornithine. In tyrocidines B, C, and D, the aromatic residues at positions three, four, and seven are gradually replaced by tryptophan (Trauger et al. 2000). Tyrocidine is produced by a functional enzyme complex consisting of three NRPS, TycA, TycB, and TycC. (Mootz and Marahiel 1997).

[0116] Other non-ribosomal peptides of present interest include protease or proteasome inhibitor peptides, such as epoxyketones, e.g., eponemycin and epoxomicin, as well as carmaphycin, TMC-89A, macyranones, clarepoxcins, and landepoxcins; syrbactins, such as syringolins, e.g., syringolin A, glidobactins, e.g., glidobactin A, and cepafungins. See e.g., Kaysser 2019. Also of interest are gramicidins, e.g., Gramicidin S. See, e.g., Ogasawara and Dairi 2018.

[0117] In specific embodiments, the NRPS that may be utilised in the present methods include but are not limited to bacterial enzymes, such as Pseudomonas, Streptomyces, or Bacillus (e.g., Brevibacillus) enzymes. Exemplifications of these are NRPS that produce siderophore peptides or antibiotic peptides, and NRPS that produce protease or proteasome inhibitors. Examples include but are not limited to: Epn enzymes such as EpnG, and Epx enzymes such as EpxD, Syl enzymes such as SylC and SylD, Glb enzymes such as GlbC and GlbF, Grs enzymes such as GrsA and GrsB, as well as Pvd enzymes such as PvdJ and PvdD, and Tyc enzymes such as TycA, TycB, and TycC, and any variants of these, as described herein.

[0118] Modified NRPS enzymes, as well as modified NRPS polypeptides, modified NRPS domains, and modified NRPS modules are particularly noted. Of interest are NRPS polypeptides with a modified A domain, and in particular, a modified A domain comprising a linker region or part thereof, and downstream of this, a substrate binding pocket sequence of an A domain, and, optionally, an additional linker sequence downstream to the substrate binding pocket sequence of the A domain. As specific exemplifications, the modified A domain may be a modified A domain from one or more of the NRPS enzymes noted herein. Modified polynucleotides that encode the modified amino acid sequences are also noted.

[0119] In specific embodiments, NRP of the present disclosure include but are not limited to bacterial peptides, such as Pseudomonas, Streptomyces, or Bacillus (e.g., Brevibacillus) peptides. Exemplifications of these are siderophore non-ribosomal peptides, antibiotic non-ribosomal peptides, anticancer non-ribosomal peptides, and non-ribosomal peptides with protease or proteome inhibitory activity. Exemplifications of these are pyoverdines, tyrocidines, peptidyl-epoxyketones, syrbactins, and gramicidins. Examples include but are not limited to: PvdI, II, III, tyrocidine A, B, C, D, eponemycin, epoxomicin, syringolin, glidobactin, and Gramicidin S, and any variants thereof, as described herein. Of particular interest are NRP produced with a modified NRPS, a modified NRPS module, or a modified NRPS domain, as detailed in this description.

### Related Peptides, Polypeptides, and Polynucleotides

[0120] In addition to the sequences noted herein, the methods of the invention may be used to obtain modified peptide, polypeptide, and polynucleotide sequences. In one embodiment, the invention utilises modified NRPS polynucleotides and polypeptides, for example, fragments or sequence variations as described herein. Modifications of NRPS polypeptides, including modified NRPS domains, and modified NRPS modules, are specifically encompassed by the present disclosure. Modified polynucleotides encoding these sequences are also encompassed, as are modified NRP produced by these NRPS polypeptides.

[0121] As demonstrated herein, the inventors have found that functional recombinant NRPS modules can be created by substituting an A domain from one NRPS module into another NRPS module, utilising favourable recombination sites. In particular, recombination sites can be utilised within the alpha-helix of the C domain (referred to as the terminal helix), or within the helix situated between the A domain and the C domain (referred to as the linker helix; Tanovic et al. 2008), or within the sequence that separates the two helices. The most preferred recombination sites are within the region spanning from the C-terminus of the terminal helix of the C domain to the N-terminus of the 11-residue helix within the linker region of the A domain. FIG. 1 shows the amino acid sequences that constitute the terminal helix and the linker helix, as depicted for the C-A-T domains from the second module of PvdD (SEQ ID NO: 1) and the first module of TycB (SEQ ID NO: 2). FIG. 12C shows the different recombination points that have been used to generate functional recombinant PvdD enzymes that were able to produce modified pyoverdines, as presently disclosed.

[0122] In accordance with the current findings, preferred recombination sites will reside within the nucleotide sequence that encodes, inclusively, the terminal helix of the C domain through to the linker helix of the A domain. To identify the terminal helix and the linker helix within an NRPS module that comprises a C domain joined to an A domain, the primary amino acid sequence can be analysed by standard methods. In particular, a secondary structure prediction tool may be used, such as YASPIN (Lin et al, 2005). Alternatively, equivalent regions can be determined using sequence alignment to a previously analysed module. For example, the present disclosure demonstrates that the sequence alignment in FIG. 12C can be used to locate the equivalent regions between PvdD module 2 and TycB module 1. In this way, it will be possible to substitute an A domain in any of the NRPS polypeptides set out herein.

[0123] The present disclosure therefore encompasses a non-naturally occurring NRPS polypeptide, for example, a non-naturally occurring NRPS module, which comprises in an N-terminal to C-terminal direction: (1) an amino acid sequence from a first NRPS module, e.g., comprising a C-domain from the C1 motif to the C7 motif, and (2) an amino acid sequence from a second NRPS module, e.g., comprising an A domain or a fragment thereof. The sequence of the second NRPS module may include an A domain binding pocket. It is expected that inclusion of an A domain binding pocket can be particularly advantageous. In particular, the new A domain binding pocket can be one that activates a different amino acid. For example, the binding pocket of the new A domain may differ from the original A domain by 1 to 10 amino acids. The one or more altered amino acids may be one or more of the eight amino acids that determine the specificity of a particular A domain, as described herein. This may be determined by the Stachelhaus code, or other suitable means. In certain aspects, the A domains can be substituted between NRPS polypeptides that have relatively low sequence identity. For example, lower levels of sequence identity may be found between the C domains of the two NRPS polypeptides, between the linker regions of the NRPS polypeptides, or between the A domains of the NRPS polypeptides. The sequence of the second NRPS module may include an optional additional C-terminal sequence. In particular, it may be advantageous to include a C-terminal sequence comprising a domain from another NRPS module. For example, this can be a domain from the first NRPS module or from a different NRPS module altogether.

[0124] As an N-terminal junction, the sequence of the second NRPS module may begin at a site within the terminal helix of the C domain of the first NRPS module, at a site within the linker helix of the A domain of the first NRPS module, or at a site between the terminal helix of the C domain and linker helix of the A domain of the first NRPS module, inclusive. As a C-terminal junction, the sequence of the second NRPS module may end at a site after the A10 motif of the first NRPS module, whether it lies within the A domain or the T domain. It will be understood that the junctions of the second NRPS module may be altered as desired.

[0125] Therefore, in various embodiments, the amino acid sequence from the second NRPS module may begin (i.e., N-terminal junction) at a site positioned within the terminal helix of the C domain of the first NRPS module, at a site positioned within the linker helix of the A domain of the first NRPS module, or at a site positioned in the region between these helices. Preferably, the amino acid sequence from the second NRPS module begins at a site positioned between the terminal helix of the C domain and the linker helix of the A domain of the first NRPS module. The region encompassing the terminal helix of the C domain to the linker helix of the A domain may comprise, e.g., at least 10 amino acids, at least 11 amino acids, at least 12 amino acids, at least 13 amino acids, at least 14 amino acids, or at least 15 amino acids. As one example, the amino acid sequence from the second NRPS module may begin at a position immediately following the C-terminus of the terminal helix of the C domain of the first NRPS module. As one other example, the amino acid sequence from the second module may begin at a position immediately preceding the N-terminus of the linker helix of the A domain of the first NRPS module.

[0126] In additional embodiments, the amino acid sequence from the second NRPS module may end (i.e., C-terminal junction) at a site preceding the first helix of the T domain of the first NRPS module. As one example, the amino acid sequence from the second NRPS module comprises a sequence that ends at a site in a region encompassing: the residue immediately following the A domain binding pocket to 20 residues following the A10 motif of the first NRPS module. As one other example, the amino acid sequence from the second NRPS module comprises a sequence that ends at a site in a region encompassing: the residue immediately following the A domain binding pocket to 10 residues following the A10 motif of the first NRPS module. In particular, it may be advantageous to utilise an approach where the A domain is substituted without any of the corresponding T domain. This approach can be used to makes scaling up easier. By avoiding modification of the T domain, this can allow the enzyme to pass the substrate to the C-terminal domain (Calcott and Ackerley, 2015; Owen et al, 2016; Linne et al, 2001; Strieker et al, 2010). This approach also keeps the substituted region as small as possible, which in general, reduces costs and makes polynucleotide manipulations easier.

[0127] It will be understood that any of the exemplary downstream junctions can be utilised with any of the exemplary upstream junctions, in accordance with the present disclosure. In certain embodiments, the first NRPS module and the second NRPS module have different substrate specificity. While not strictly necessary, it may be desirable that the first NRPS module and the second NRPS module share reduced levels of sequence identity. For example, the amino acid sequence from the second NRPS module may share less than 40%, less than 50%, less than 60% or less than 70% sequence identity to the equivalent amino acid sequence from the first NRPS module. In the same way, the amino acid sequence from the first NRPS module may share less than 40%, less than 50%, less than 60% or less than 70% sequence identity to the equivalent amino acid sequence from the second NRPS module. In addition, the A domain binding pocket of the second module may differ from the A domain binding pocket of the first module by 1 or more amino acids. For example, the A domain binding pocket of the second module may differ from the A domain binding pocket of the first module by 2 or more, 3 or more, 4 or more, 5 or more, 6 or more, 7 or more, or 8 amino acids.

[0128] It may be desirable to include an optional C-terminal sequence as part of the amino acid sequence from the second NRPS module. For example, as an optional C-terminal sequence, the sequence from the second NRPS module may include a sequence from the first NRPS module. In this case, the A domain may be substituted on its own into a different module, i.e., the C and T domains are from the first module and the A domain are from the second module. Alternatively, as an optional C-terminal sequence, the sequence from the second NRPS module may include a sequence from a third NRPS module. While the experiments set out herein use an LCL domain and a DCL domain, the present disclosure also allows for A domain substitutions juxtaposed to other types of C domains. Various functional subtypes of the C domain exist. For example, an LCL domain catalyses a peptide bond between two L-amino acids, a DCL domain links an L-amino acid to a growing peptide ending with a D-amino acid, a Starter C domain acylates the first amino acid with a β-hydroxy-carboxylic acid (typically a β-hydroxyl fatty acid), and heterocyclisation (Cyc) domains catalyse both peptide bond formation and subsequent cyclization of cysteine, serine or threonine residues. Further to this, dual E/C domains catalyse both epimerization and condensation (Rausch et al. 2007).

[0129] While the above noted embodiments have been discussed in terms of amino acid sequences, it should be acknowledged that the NRPS domains, modules, helices, junction sites, N-terminal sites, and C-terminal sites can be understood in terms of the corresponding nucleotide sequences. In particular, favourable recombination sites can be determined from the description noted above and elsewhere herein, so as to construct the non-naturally occurring polypeptide of the present disclosure.

[0130] In addition the particular nucleotide and amino acid sequences set out herein, variant sequences may also be utilised. In various embodiments, polynucleotide variants encompass naturally occurring, recombinantly, and synthetically produced polynucleotides. As exemplifications, variant polynucleotide sequences exhibit at least 50%, at least 60%, at least 70%, at least 71%, at least 72%, at least 73%, at least 74%, at least 75%, at least 76%, at least 77%, at least 78%, at least 79%, at least 80%, at least 81%, at least 82%, at least 83%, at least 84%, at least 85%, at least 86%, at least 87%, at least 88%, at least 89%, at least 90%, at least 91%, at least 92%, at least 93%, at least 94%, at least 95%, at least 96%, at least 97%, at least 98%, and at least 99% identity to a sequence of the present disclosure. In the same way, a polynucleotide encoding an NRPS, an NRPS module, an NRPS domain, an NRPS domain helix, or an NRPS domain binding pocket may be modified to include the above noted levels of sequence identity.

[0131] As a variant polynucleotide sequence, a fragment of a polynucleotide sequence includes a subsequence of contiguous nucleotides. In one embodiment, the polynucleotide fragment allows expression of at least a portion of an NRPS, e.g., expression of one or more functional domain of the polypeptide. Specifically noted are polynucleotides and polynucleotide fragments encoding A domains, fragments of A domains, and any modified A domains, as described herein.

[0132] Variant polynucleotides include polynucleotides that differ from the disclosed sequences but that, as a consequence of the degeneracy of the genetic code, encode a polypeptide having similar activity to a polypeptide encoded by a disclosed polynucleotide. A sequence alteration that does not change the amino acid sequence of the polypeptide is termed a silent variation. Except for ATG (methionine) and TGG (tryptophan), other codons for the same amino acid may be changed by art recognised techniques, e.g., to optimise codon expression in a particular host organism.

[0133] For polynucleotides, sequence identity may be found over a comparison window of at least 1500 nucleotide positions, at least 2000 nucleotide positions, at least 2500 nucleotide positions, at least 3000 nucleotide positions, at least 3500 nucleotide positions, at least 3800 nucleotide positions, or over the entire length of a polynucleotide used according to a method of the invention. For a polynucleotide encoding an NRPS module, an NRPS domain, an NRPS domain helix, or an NRPS domain binding pocket, shorter regions may be compared, for example, at least 50 nucleotide positions, at least 100 nucleotide positions, at least 200 nucleotide positions, at least 300 nucleotide positions, at least 400 nucleotide positions, at least 500 nucleotide positions, at least 600 nucleotide positions, at least 700 nucleotide positions, at least 800 nucleotide positions, at least 900 nucleotide positions, or at least 1000 nucleotide positions.

[0134] Polynucleotide sequence alterations resulting in conservative substitutions of one or several amino acids in the encoded polypeptide sequence without significantly altering its biological activity are also included in the invention. A skilled artisan will be aware of methods for making phenotypically silent amino acid substitutions (see, e.g., Bowie et al. 1990).

[0135] Polynucleotide sequence identity and similarity can be determined in the following manner. The subject polynucleotide sequence is compared to a candidate polynucleotide sequence using sequence alignment algorithms and sequence similarity search tools such as in GenBank, EMBL, Swiss-PROT and other databases. Nucleic Acids Res 29:1-10 and 11-16, 2001 provides examples of online resources.

[0136] In various embodiments, polypeptide variants encompass naturally occurring, recombinantly, and synthetically produced polypeptides. As exemplifications, variant polypeptide sequences exhibit at least 50%, at least 60%, at least 70%, at least 71%, at least 72%, at least 73%, at least 74%, at least 75%, at least 76%, at least 77%, at least 78%, at least 79%, at least 80%, at least 81%, at least 82%, at least 83%, at least 84%, at least 85%, at least 86%, at least 87%, at least 88%, at least 89%, at least 90%, at least 91%, at least 92%, at least 93%, at least 94%, at least 95%, at least 96%, at least 97%, at least 98%, or at least 99% identity to a sequence of the present disclosure. In the same way, a polypeptide sequence of an NRPS, an NRPS module, an NRPS domain, an NRPS domain helix, or an NRPS domain binding pocket may be modified to include the above noted levels of sequence identity.

[0137] As a variant polypeptide sequence, a fragment of a polypeptide sequence includes a subsequence of contiguous amino acids. In one embodiment, a polypeptide fragment is a functional fragment, i.e., a fragment capable of binding or other biological activity. For example, an NRPS polypeptide fragment may be capable of producing a particular NRP. In a particular embodiment, the polypeptide fragment may include at least one functional domain. For example, for an NRPS polypeptide, a fragment would include an A domain, an A domain fragment, or a modification thereof, as described herein.

[0138] As to polypeptide variants, an amino acid sequence may differ from a polypeptide disclosed herein by one or more conservative amino acid substitutions, deletions, additions or insertions which do not affect the biological activity of the peptide. Conservative substitutions typically include the substitution of one amino acid for another with similar characteristics, e.g., substitutions within the following groups: glycine, alanine; valine, isoleucine, leucine; aspartic acid, glutamic acid; asparagine, glutamine; serine, threonine; lysine, arginine; and phenylalanine, tyrosine. Non-conservative substitutions will entail exchanging a member of one of these classes for a member of another class.

[0139] Other variants include peptides with modifications which influence peptide stability. Such analogues may contain, for example, one or more non-peptide bonds (which replace the peptide bonds) in the peptide sequence. Also included are analogues that include residues other than naturally occurring L-amino acids, e.g. D-amino acids or non-naturally occurring synthetic amino acids, e.g. beta or gamma amino acids and cyclic analogues.

[0140] Substitutions, deletions, additions, or insertions may be made by mutagenesis methods known in the art. A skilled worker will be aware of methods for making phenotypically silent amino acid substitutions. See, for example, Bowie et al. 1990. A polypeptide may be modified during or after synthesis, for example, by biotinylation, benzylation, glycosylation, phosphorylation, amidation, by derivatisation using blocking/protecting groups and the like. Such modifications may increase stability or activity of the polypeptide.

[0141] For polypeptides, sequence identity may be found over a comparison window of at least 600 amino acid positions, at least 700 amino acid positions, at least 800 amino acid positions, at least 900 amino acid positions, at least 1000 amino acid positions, at least 1100 amino acid positions, at least 1200 amino acid positions, or over the entire length of a polypeptide used in or identified according to a method of the invention. For a polypeptide comprising an NRPS module, an NRPS domain, an NRPS domain helix, or an NRPS domain binding pocket, shorter regions may be compared, for example, at least 8 amino acid positions, at least 10 amino acid positions, at least 20 amino acid positions, at least 30 amino acid positions, at least 40 amino acid positions, at least 50 amino acid positions, at least 60 amino acid positions, at least 70 amino acid positions, at least 80 amino acid positions, at least 90 amino acid positions, or at least 100 amino acid positions.

[0142] Polypeptide variants also encompass those that exhibit a similarity to one or more of the specifically identified sequences that is likely to preserve the functional equivalence of those sequences and which could not reasonably be expected to have occurred by random chance. For polynucleotides and polypeptides, exemplary sequence alignment platforms include but are not limited to: homology alignment algorithms (Needleman and Wunsch (1970) J Mol Biol 48: 443); local homology algorithms (Smith and Waterman (1981) Adv Appl Math 2: 482); searches for similarity (Pearson and Lipman (1988) PNAS USA 85: 2444). In specific embodiments, the BLAST algorithm may be used (Altschul et al. (1990) J Mol Biol 215: 403-410; Henikoff and Henikoff. (1989) PNAS USA 89: 10915; Karlin and Altschul (1993) PNAS USA 90: 5873-5787). Software for performing BLAST analyses is publicly available through the National Center for Biotechnology Information. Other examples of alignment software include GAP, BESTFIT, FASTA, PILEUP, and TFASTA provided by Wisconsin Genetics Software Package (Genetics Computer Group), and CLUSTAL programs such as ClustalW, ClustalX, and Clustal Omega (see, e.g., Thompson et al. (1994) Nuc Acids Res 22: 4673-4680).

### Expression of NRPS Polypeptides and Production of NRP

[0143] In one embodiment of the present disclosure, the NRPS polypeptide (e.g., a modified NRPS polypeptide) is expressed using a nucleic acid construct. For example, an NRPS construct may be used, i.e., a nucleic acid expression construct that comprises a polynucleotide sequence that encodes an NRPS polypeptide operatively linked to a promoter that allows expression of the polynucleotide sequence to form the NRPS polypeptide. Preferably, the NRPS polypeptide that is employed produces a protease inhibitor or proteasome inhibitor, a siderophore peptide, an anticancer peptide, or antibiotic peptide, or a functional variant of the polypeptide may be employed.

[0144] An expression cassette may be used to include the necessary elements that permit the transcription of a polynucleotide molecule that has been cloned or inserted into the construct. Optionally, the expression cassette may comprise some or all of the necessary elements for translating the transcript produced from the expression cassette into a polypeptide. An expression cassette may include NRPS coding regions. It may also include any necessary noncoding regions.

[0145] The NRPS construct may be a construct for expression the appropriate NRPS polypeptide, as set out herein, or other peptide-producing NRPS polypeptide, or any functional variants thereof. The construct may be a nucleic acid expression construct comprising a polynucleotide sequence encoding the NRPS polypeptide operatively linked to a promoter that allows expression of the polynucleotide sequence.

[0146] In accordance with the present invention, the activation of the NRPS polypeptide or its functional variant can be carried out prior to or following isolation of the NRPS polypeptide or its functional variant, i.e., pre-isolation activation or post-isolation activation. In addition, the NRPS polypeptide or its functional variant may be activated in vitro prior to incubation with a test sample, or the NRPS polypeptide or its functional variant may be activated in vivo and isolated prior to incubation with a test sample.

[0147] The polynucleotide sequence encoding the NRPS polypeptide may be any suitable NRPS polynucleotide sequence from any organism. Preferably the organism is a bacterial cell or strain. Exemplifications include but are not limited to: Pseudomonas, Streptomyces, and Bacillus (e.g., Brevibacillus) strains, for example, P. aeruginosa, P. syringae, P. putida, P. fluorescens, and B. brevis, as well as other bacterial strains, as described in detail herein. The polynucleotide sequence encoding the NRPS polypeptide may be a naturally occurring (i.e., wild-type) or modified polynucleotide sequence. For example, a wild-type or a modified polynucleotide sequence for one or more NRPS domains may be used. In particular, the polynucleotide sequence encoding the NRPS module may be a wild-type or modified polynucleotide sequence, as described herein.

[0148] In one embodiment, a construct is made by cloning a polynucleotide sequence encoding a wild-type or modified polypeptide as above into an appropriate vector. An appropriate vector is any vector that comprises a promoter operatively linked to the cloned, inserted polynucleotide sequence that allows expression of the polypeptide from the vector. A skilled worker appreciates that different vectors may be employed in the methods of the invention. In addition methods for constructing vectors, including the choice of an appropriate vector, and the cloning and expression of a polynucleotide sequence inserted into an appropriate vector as described above is believed to be within the capabilities of a person of skill in the art (Sambrook et al. 2003).

[0149] Preferably, the expressed NRPS polypeptide comprises a functional NRPS module, or a functional variant thereof. Expression may be inducible, for example, with IPTG. Similar approaches may be used for the NRPS polypeptides disclosed herein, and any functional variants thereof. The person of skill in the art recognises that there are also many suitable alternative expression systems available that may be used in the methods of the invention to express an NRPS polypeptide.

[0150] Preferably, expression is in a suitable host cell or strain. In one embodiment, the host cell or strain may be a cell or strain of E. coli. Particularly of interest is the BAP1 strain of E. coli or any variant of this strain (Pfeifer et al. 2001). Alternatively, the expression vector is chosen to allow inducible expression in a non-E. coli host cell or strain. Expression may also be obtained using in vitro expression systems; such systems are well known in the art.

[0151] In one embodiment, multiple NRPS polypeptides are co-expressed in the same host cell or strain. To achieve expression within the same host cell or strain, the nucleotide sequences encoding the NRPS polypeptides may be cloned into suitable, separate expression vectors. Suitable vectors may have the same or compatible origins of replication in order to be stably maintained in the same host cell or strain. Preferably, at least one construct encodes an NRPS module or a functional variant thereof.

[0152] In another embodiment, one or more polynucleotide sequences encoding a NRPS polypeptide may be integrated into the chromosome of an appropriate host organism as described herein, to produce a strain useful in accordance with the present disclosure. In one embodiment, an NRPS construct comprises a nucleotide sequence encoding an NRPS polypeptide and a suitable regulatory promoter that is integrated into the chromosome of E. coli or other host organism in an appropriate orientation to allow expression of the polypeptide in the cell.

[0153] In one particular embodiment, a construct encoding an NRPS module is integrated into a host cell. For example, an NRPS construct may be integrated and then expressed in vivo. The constructs may allow co-expression of wild-type polypeptides or functional variants. Thus, in a specific embodiment, a construct that encodes an NRPS module is expressed in a host cell or strain.

[0154] In specific embodiments of the present disclosure, the expressed NRPS polypeptide may be isolated using various biochemical techniques. These techniques include but are not limited to filtration, centrifugation, and various types of chromatography, such as ion-exchange, affinity, hydrophobic interaction, size exclusion, and reverse-phase chromatography. In one particular embodiment, Ni-NTA affinity chromatography is used. As exemplifications, the polypeptides may be linked to a solid substrate such as beads, filters, fibers, paper, membranes, chips, and plates such as multiwell plates. The polypeptides may also be prepared as a polypeptide conjugates in accordance with known methods.

[0155] In particular embodiments, the present disclosure provides polynucleotide libraries that include NRPS nucleic acids. For example, a polynucleotide library may include at least 15, at least 25, at least 50, at least 100, at least 200, at least 300, at least 400, at least 500, at least 600, at least 700, at least 800, at least 900, or at least 1000 NRPS nucleic acids. Libraries of NRPS polynucleotides, and specifically variant NRPS polynucleotides, may be generated using standard methods. As exemplifications, nucleic acid libraries may be generated to include a plurality of NRPS polynucleotides with modified NRPS modules or modified NRPS domains. For example, a nucleic acid library may include NRPS polynucleotides with A domain substitutions, i.e., domain swap libraries. In addition, libraries of NRPS polynucleotides may be generated using random mutagenesis of one or more domains (e.g., A domain mutagenesis), for example, error prone PCR may be utilised (see, e.g., Beaudry and Joyce (1992) Science 257: 635 and Bartel and Szostak (1993) Science 261: 1411). Alternative means for mutagenesis may be used, for example, chemical mutagens, radiation, amongst others. Commercial kits are also available, e.g., GeneMorph® II EZClone domain mutagenesis kit (Agilent) and Diversify™ PCR random mutagenesis kit (Clontech Laboratories, Inc). The library may be provided as a mixture of polynucleotides, or may be provided via a host cell or strain.

[0156] As one embodiment of the present disclosure, a kit is provided which includes one or more NRPS polynucleotide or polypeptide. The one or more NRPS polynucleotide or polypeptide may be a modified component as described herein. The one or more polynucleotide or polypeptide may be provided in one or more containers in the kit. Additional components may also be provided with the kit, for example, one or more components to obtain expression, or one or more components to measure activity, which are intended for use with the polynucleotide(s) or polypeptide(s). Optionally, instructions may be provided with the kit, as well as any other item, such as any number of containers, labels, or measurement tools. The one or more polynucleotide or polypeptide of the kit may be provided as isolated components, or as mixtures, or may be provided via a host cell or strain.

### Host Cells and Strains

[0157] As disclosed herein, methods of production for an NRPS polypeptide (e.g., a modified NRPS polypeptide) are provided, and methods of production of peptides from a non-naturally occurring NRPS polypeptide are also provided. Host cells and their use for such production are set out in detail in this description. By use of a host cell comprising an NRPS polypeptide, this allows production of compounds by fermentation. Previously, researchers have had to purify NRPS enzymes and then attempt to use the purified enzymes in in vitro systems. An acknowledged goal for NRPS polypeptides is fermentation, i.e. in vivo production, and the methods of the present disclosure provide for this.

[0158] The expression of an NRPS polypeptide (e.g., a modified NRPS polypeptide) may be carried out in vitro or in vivo. In vivo expression may be carried out in a suitable host cell or strain. A suitable host cell or strain may be any suitable prokaryotic or eukaryotic cell in which a NRPS polypeptide, or any functional variants thereof, may be expressed. A suitable host cell or strain may be any suitable prokaryotic or eukaryotic cell in which the NRPS polypeptide may be expressed wherein the NRPS polypeptide is not activated in the cell by any endogenous activity of the cell. The suitable host cell or strain may be a bacterial cell or strain. In particular embodiments, eukaryotic cells or strains may be used.

[0159] Introduction of an NRPS construct into an appropriate host cell or strain may be achieved using any of a number of available standard protocols and/or as described herein as known and used in the art (Sambrook et al. 2003). Preferably, the NRPS construct is a construct for a synthetase polypeptide as set out herein. Preferably, the construct is inserted into an appropriate host cell or strain. Such insertion may be achieved using any of a number of available standard transformation or transduction protocols as known and used in the art (Sambrook et al. 2003).

[0160] In certain embodiments, the host cell or strain expresses a NRPS polypeptide that can be activated by a PPTase. In one embodiment, the host cell or strain is a fungal or bacterial, preferably bacterial, host cell or strain, but not limited thereto. Preferably, the bacterial cell or strain is a Gram negative bacterial cell or strain. Preferably, the bacterial cell or strain is a cell or strain of E. coli. For industrial applications, the host strain may be a Bacillus (e.g., Brevibacillus), Streptomyces, or Pseudomonas strain, or another bacterial strain as set out herein, or any functional variant thereof.

[0161] In one embodiment, the expressed polypeptide (e.g., NRPS polypeptide) is an exogenous polypeptide in the host cell or strain expressed from a construct according to the invention, but not limited thereto. Alternatively, the polypeptide is expressed from the genome of the host cell or strain. In this embodiment, the polypeptide may be endogenous or exogenous, naturally occurring or non-naturally occurring with respect of the host cell or strain. In one particular embodiment, a single host organism could be modified to allow expression of multiple NRPS polypeptides in the cell, including multiple modified NRPS modules, to maximise production of the peptide product.

[0162] By way of non-limiting example, the NRPS polypeptide may be an exogenous polypeptide expressed from an NRPS expression construct. Preferably the NRPS so expressed is a synthetase polypeptide as set out herein, or a functional variant thereof. In this embodiment, the NRPS polypeptide is an exogenous NRPS polypeptide that synthesizes a protease or proteasome inhibitor, a siderophore, an anticancer peptide, or an antibiotic peptide. Preferably, the synthesised product is an NRP as set out herein, or a variant thereof. The synthesis of an NRP may be carried out in vitro or in vivo. In vivo expression may be carried out in a suitable host cell or strain. A suitable host cell or strain may be any suitable prokaryotic or eukaryotic cell in which an NRP, or any functional variants thereof, may be synthesised. A suitable host cell or strain may be any suitable prokaryotic or eukaryotic cell in which the peptide may be synthesised wherein the corresponding NRPS polypeptide is not activated in the cell by any endogenous activity of the cell. The suitable host cell or strain may be a bacterial cell or strain. In particular embodiments, eukaryotic cells or strains may be used.

[0163] Host cells and strains useful in the invention are not limited to strains of E. coli or the other strains described herein, such as Pseudomonas, Streptomyces, and Bacillus (e.g., Brevibacillus) strains, for example, P. aeruginosa (e.g., P. aeruginosa PAO1), P. syringae (e.g., P. syringae pv. phaseolicola 1448A), P. putida (e.g., P. putida KT2440), P. fluorescens, and B. brevis. Numerous alternative host organisms may be useful in the methods according to the invention, wherein each cell or strain may provide a different or additional benefit or utility. The choice of an appropriate host strain will affect choice of construct used based on the genetic makeup of the host. A key reason for using different host strains is that not all proteins can be expressed effectively in some strains (e.g., E. coli strains) due to promoter inactivity, codon bias, protein insolubility, or other factors. Therefore, the use of different host strains provides alternative hosts suitable for use in production of any polypeptide or peptide of interest. Cell free expression systems and cell free synthesis systems may also be used in accordance with standard methodology.

### Sequence Information

[0164] The nucleotide and amino acid sequences of the present disclosure are set out below. A brief description of each sequence is also provided in the table, below.

SEQ ID NO: 1 is an amino acid sequence of the CAT-domains from the second module of PvdD
SEQ ID NO: 2 is an amino acid sequence of the CAT-domains from the first module of PvdJ
SEQ ID NO: 3 is the nucleotide sequence of the plasmid pUCP22:pBAD
SEQ ID NO: 4 is the nucleotide sequence of the plasmid pUCBAD-SMC
SEQ ID NO: 5 is the nucleotide sequence of the plasmid pDEC-Lys
SEQ ID NO: 6 is the nucleotide sequence of the plasmid pDEC-Thr
SEQ ID NO: 7 is the nucleotide sequence of the plasmid pTRN
SEQ ID NO: 8 is the nucleotide sequence used to substitute the C domain from the first
module of PvdJ into the second module of PvdD
SEQ ID NO: 9 is the translation of SEQ ID NO: 8 having the residues substituted into PvdD
underlined.
SEQ ID NO: 10 is the nucleotide sequence used to substitute the C domain from the first
module of PvdD back into the second module of PvdD
SEQ ID NO: 11 is the translation of SEQ ID NO: 10
SEQ ID NO: 12 is the nucleotide sequence used to substitute region 1 of the C domain from
the first module of PvdJ into the second module of PvdD
SEQ ID NO: 13 is the translation of SEQ ID NO: 12 having the residues substituted into
PvdD underlined.
SEQ ID NO: 14 is the nucleotide sequence used to substitute region 2 of the C domain from
the first module of PvdJ into the second module of PvdD
SEQ ID NO: 15 is the translation of SEQ ID NO: 14 having the residues substituted into
PvdD underlined.
SEQ ID NO: 16 is the nucleotide sequence used to substitute region 3 of the C domain from
the first module of PvdJ into the second module of PvdD
SEQ ID NO: 17 is the translation of SEQ ID NO: 16 having the residues substituted into
PvdD underlined.
SEQ ID NO: 18 is the nucleotide sequence used to substitute regions 2 and 3 of the C
domain from the first module of PvdJ into the second module of PvdD
SEQ ID NO: 19 is the translation of SEQ ID NO: 18 having the residues substituted into
PvdD underlined.
SEQ ID NO: 20 is the nucleotide sequence used to substitute regions 1 and 3 of the C
domain from the first module of PvdJ into the second module of PvdD
SEQ ID NO: 21 is the translation of SEQ ID NO: 20 having the residues substituted into
PvdD underlined.
SEQ ID NO: 22 is the nucleotide sequence used to substitute regions 1 and 2 of the C
domain from the first module of PvdJ into the second module of PvdD
SEQ ID NO: 23 is the translation of SEQ ID NO: 22 having the residues substituted into
PvdD underlined.
SEQ ID NO: 24 is the nucleotide sequence used to substitute 6 residues of the C domain
from the first module of PvdJ into the second module of PvdD
SEQ ID NO: 25 is the translation of SEQ ID NO: 24 having the residues substituted into
PvdD underlined.
SEQ ID NO: 26 is the nucleotide sequence used to substitute 12 residues of the C domain
from the first module of PvdJ into the second module of PvdD
SEQ ID NO: 27 is the translation of SEQ ID NO: 26 having the residues substituted into
PvdD underlined.
SEQ ID NO: 28 is the nucleotide sequence used to substitute the loop residues of the C
domain from the first module of PvdJ into the second module of PvdD
SEQ ID NO: 29 is the translation of SEQ ID NO: 28 having the residues substituted into
PvdD underlined.
SEQ ID NO: 30 is the nucleotide sequence used to substitute the 6 residues plus the loop
residues of the C domain from the first module of PvdJ into the second module of PvdD
SEQ ID NO: 31 is the translation of SEQ ID NO: 30 having the residues substituted into
PvdD underlined.
SEQ ID NO: 32 is the nucleotide sequence used to substitute the 6 residues plus the edge
loop residues of the C domain from the first module of PvdJ into the second module of
PvdD
SEQ ID NO: 33 is the translation of SEQ ID NO: 32 having the residues substituted into
PvdD underlined.
SEQ ID NO: 34 is the nucleotide sequence used to substitute the 12 residues plus the loop
residues of the C domain from the first module of PvdJ into the second module of PvdD
SEQ ID NO: 35 is the translation of SEQ ID NO: 34 having the residues substituted into
PvdD underlined.
SEQ ID NO: 36 is the nucleotide sequence used to substitute the linker residues of the C
domain from the first module of PvdJ into the second module of PvdD
SEQ ID NO: 37 is the translation of SEQ ID NO: 36 having the residues substituted into
PvdD underlined.
SEQ ID NO: 38 is the nucleotide sequence used to substitute CA-domains from the first
module of PvdJ into the second module of PvdD
SEQ ID NO: 39 is the translation of SEQ ID NO: 38 having the residues substituted into
PvdD underlined.
SEQ ID NO: 40 is the nucleotide sequence used to substitute CA-domains from Ser specific
module into the second module of PvdD
SEQ ID NO: 41 is the translation of SEQ ID NO: 40 having the residues substituted into
PvdD underlined.
SEQ ID NO: 42 is the nucleotide sequence used to substitute CA-domains from fhOrn
specific module into the second module of PvdD
SEQ ID NO: 43 is the translation of SEQ ID NO: 42 having the residues substituted into
PvdD underlined.
SEQ ID NO: 44 is the nucleotide sequence used to substitute the linker + A-domain from
a Lys specific module into the second module of PvdD
SEQ ID NO: 45 is the translation of SEQ ID NO: 44 having the residues substituted into
PvdD underlined.
SEQ ID NO: 46 is the nucleotide sequence used to substitute the linker + A-domain from
a Ser specific module into the second module of PvdD
SEQ ID NO: 47 is the translation of SEQ ID NO: 46 having the residues substituted into
PvdD underlined.
SEQ ID NO: 48 is the nucleotide sequence used to substitute the linker + A-domain from
fhOrn specific module into the second module of PvdD
SEQ ID NO: 49 is the translation of SEQ ID NO: 48 having the residues substituted into
PvdD underlined.
SEQ ID NO: 50 is the nucleotide sequence used to substitute the linker + A-domain from
CP008696.1.cluster009_A1 into the second module of PvdD
SEQ ID NO: 51 is the translation of SEQ ID NO: 50 having the residues substituted into
PvdD underlined.
SEQ ID NO: 52 is the nucleotide sequence used to substitute the linker + A-domain from
CP006852.1.cluster006_A4 into the second module of PvdD
SEQ ID NO: 53 is the translation of SEQ ID NO: 52 having the residues substituted into
PvdD underlined.
SEQ ID NO: 54 is the nucleotide sequence used to substitute the linker + A-domain from
CP011507.1.cluster002_A1 into the second module of PvdD
SEQ ID NO: 55 is the translation of SEQ ID NO: 54 having the residues substituted into
PvdD underlined.
SEQ ID NO: 56 is the nucleotide sequence used to substitute the linker + A-domain from
CP003041.1.cluster006_A2 into the second module of PvdD
SEQ ID NO: 57 is the translation of SEQ ID NO: 56 having the residues substituted into
PvdD underlined.
SEQ ID NO: 58 is the nucleotide sequence used to substitute the linker + A-domain from
APO 13068.l.cluster003_A1 into the second module of PvdD
SEQ ID NO: 59 is the translation of SEQ ID NO: 58 having the residues substituted into
PvdD underlined.
SEQ ID NO: 60 is the nucleotide sequence used to substitute the linker + A-domain from
CP010945.1.cluster006_A1 into the second module of PvdD
SEQ ID NO: 61 is the translation of SEQ ID NO: 60 having the residues substituted into
PvdD underlined.
SEQ ID NO: 62 is the nucleotide sequence used to substitute the linker + A-domain from
AM181176.4.cluster005_A2 into the second module of PvdD
SEQ ID NO: 63 is the translation of SEQ ID NO: 62 having the residues substituted into
PvdD underlined.
SEQ ID NO: 64 is the nucleotide sequence used to substitute the linker + A-domain from
CP000680.1.cluster003_A3 into the second module of PvdD
SEQ ID NO: 65 is the translation of SEQ ID NO: 64 having the residues substituted into
PvdD underlined.
SEQ ID NO: 66 is the nucleotide sequence used to substitute the linker + A-domain from
CP011972.1.cluster002_A4 into the second module of PvdD
SEQ ID NO: 67 is the translation of SEQ ID NO: 66 having the residues substituted into
PvdD underlined.
SEQ ID NOs: 68, 70, 72, 74, 76, 78, 80, 82, 84, 86, 88, 90 are the nucleotide sequences
used to substitute a small region of the Ser or Lys specific A-domains into the second
module of PvdD
SEQ ID NOs: 69, 71, 73, 75, 77, 79, 81, 83, 85, 87, 89, 91 are the translations of the
nucleotide sequences noted directly above having the residues substituted into PvdD
underlined.
SEQ ID NO: 92 is the nucleotide sequence used to substitute the Ser specific A-domain
with the upstream recombination point A into the second module of PvdD
SEQ ID NO: 93 is the translation of SEQ ID NO: 92 having the residues substituted into
PvdD underlined.
SEQ ID NO: 94 is the nucleotide sequence used to substitute the Ser specific A-domain
with the upstream recombination point B into the second module of PvdD
SEQ ID NO: 95 is the translation of SEQ ID NO: 94 having the residues substituted into
PvdD underlined.
SEQ ID NO: 96 is the nucleotide sequence used to substitute the Ser specific A-domain
with the upstream recombination point C into the second module of PvdD
SEQ ID NO: 97 is the translation of SEQ ID NO: 96 having the residues substituted into
PvdD underlined.
SEQ ID NO: 98 is the nucleotide sequence used to substitute the Ser specific A-domain
with the upstream recombination point D into the second module of PvdD
SEQ ID NO: 99 is the translation of SEQ ID NO: 98 having the residues substituted into
PvdD underlined.
SEQ ID NO: 100 is the nucleotide sequence used to substitute the fhOrn specific A-domain
with the upstream recombination point A into the second module of PvdD
SEQ ID NO: 101 is the translation of SEQ ID NO: 100 having the residues substituted into
PvdD underlined.
SEQ ID NO: 102 is the nucleotide sequence used to substitute the fhOrn specific A-domain
with the upstream recombination point B into the second module of PvdD
SEQ ID NO: 103 is the translation of SEQ ID NO: 102 having the residues substituted into
PvdD underlined.
SEQ ID NO: 104 is the nucleotide sequence used to substitute the fhOrn specific A-domain
with the upstream recombination point C into the second module of PvdD
SEQ ID NO: 105 is the translation of SEQ ID NO: 104 having the residues substituted into
PvdD underlined.
SEQ ID NO: 106 is the nucleotide sequence used to substitute the fhOrn specific A-domain
with the upstream recombination point D into the second module of PvdD
SEQ ID NO: 107 is the translation of SEQ ID NO: 106 having the residues substituted into
PvdD underlined.
SEQ ID NO: 108 is the nucleotide sequence of the plasmid pET28:ProC-TTe
SEQ ID NO: 109 is the nucleotide sequence used to substitute the A-domain from the first
module of TycB into the second module of PvdD
SEQ ID NO: 110 is the translation of SEQ ID NO: 109 having the residues substituted into
PvdD underlined.
SEQ ID NO: 111 is the nucleotide sequence used to substitute the A-domain from the sixth
module of TycC into the second module of PvdD
SEQ ID NO: 112 is the translation of SEQ ID NO: 111 having the residues substituted into
PvdD underlined.
SEQ ID NO: 113 is the nucleotide sequence used to substitute the A-domain from SrfA-C
into the second module of PvdD
SEQ ID NO: 114 is the translation of SEQ ID NO: 113 having the residues substituted into
PvdD underlined.
SEQ ID NO: 115 is the nucleotide sequence used to substitute the A-domain from
NZ_CP021920.1.cluster002_Phe into the second module of PvdD
SEQ ID NO: 116 is the translation of SEQ ID NO: 115 having the residues substituted into
PvdD underlined.
SEQ ID NO: 117 is the nucleotide sequence used to substitute the A-domain from
NZ_CP020028.1.cluster004_Leu into the second module of PvdD
SEQ ID NO: 118 is the translation of SEQ ID NO: 117 having the residues substituted into
PvdD underlined.
SEQ ID NO: 119 is the nucleotide sequence used to substitute the A-domain from
NZ_CM000756.1.cluster012_Leu into the second module of PvdD
SEQ ID NO: 120 is the translation of SEQ ID NO: 119 having the residues substituted into
PvdD underlined.
SEQ ID NO: 121 is the nucleotide sequence of the plasmid pACYC:PheATE
SEQ ID NO: 122 is an amino acid sequence of region 1 of the C domain from the second
module of PvdD
SEQ ID NO: 123 is an amino acid sequence of region 2 of the C domain from the second
module of PvdD
SEQ ID NO: 124 is an amino acid sequence of region 3 of the C domain from the second
module of PvdD
SEQ ID NO: 125 is an amino acid sequence of region 1 of the C domain from the second
module of PvdJ
SEQ ID NO: 126 is an amino acid sequence of region 2 of the C domain from the second
module of PvdJ
SEQ ID NO: 127 is an amino acid sequence of region 3 of the C domain from the second
module of PvdJ
SEQ ID NO: 128 is an amino acid sequence EpnG
SEQ ID NO: 129 is an amino acid sequence EpxD
SEQ ID NO: 130 is an amino acid sequence SylC
SEQ ID NO: 131 is an amino acid sequence SylD
SEQ ID NO: 132 is an amino acid sequence GlbC
SEQ ID NO: 133 is an amino acid sequence GlbF
SEQ ID NO: 134 is an amino acid sequence PvdJ
SEQ ID NO: 135 is an amino acid sequence PvdD
SEQ ID NO: 136 is an amino acid sequence TycA
SEQ ID NO: 137 is an amino acid sequence TycB
SEQ ID NO: 138 is an amino acid sequence TycC
SEQ ID NO: 139 is an amino acid sequence GrsA
SEQ ID NO: 140 is an amino acid sequence GrsB
SEQ ID NO: 141 is the nucleotide sequence used to substitute the C- and A-domains from a
Gly specifying module into the second module of PvdD
SEQ ID NO: 142 is the translation of SEQ ID NO: 141 having the residues substituted into
PvdD underlined
SEQ ID NO: 143 is the nucleotide sequence used to substitute the Gly specific A-domain
with the upstream recombination point A into the second module of PvdD
SEQ ID NO: 144 is the translation of SEQ ID NO: 143 having the residues substituted into
PvdD underlined
SEQ ID NO: 145 is the nucleotide sequence used to substitute the Gly specific A-domain
with the upstream recombination point X into the second module of PvdD
SEQ ID NO: 146 is the translation of SEQ ID NO: 145 having the residues substituted into
PvdD underlined
SEQ ID NO: 147 is the nucleotide sequence used to substitute the Gly specific A-domain
with the upstream recombination point B into the second module of PvdD
SEQ ID NO: 148 is the translation of SEQ ID NO: 147 having the residues substituted into
PvdD underlined
SEQ ID NO: 149 is the nucleotide sequence used to substitute the Gly specific A-domain
with the upstream recombination point C into the second module of PvdD
SEQ ID NO: 150 is the translation of SEQ ID NO: 149 having the residues substituted into
PvdD underlined
SEQ ID NO: 151 is the nucleotide sequence used to substitute the Gly specific A-domain
with the upstream recombination point D into the second module of PvdD
SEQ ID NO: 152 is the translation of SEQ ID NO: 151 having the residues substituted into
PvdD underlined
SEQ ID NO: 153 is the nucleotide sequence used to substitute the C- and A-domains of a
Phe specifying module into the second module of PvdD
SEQ ID NO: 154 is the translation of SEQ ID NO: 153 having the residues substituted into
PvdD underlined
SEQ ID NO: 155 is the nucleotide sequence used to substitute the Phe specific A-domain
with the upstream recombination point A into the second module of PvdD
SEQ ID NO: 156 is the translation of SEQ ID NO: 155 having the residues substituted into
PvdD underlined
SEQ ID NO: 157 is the nucleotide sequence used to substitute the Phe specific A-domain
with the upstream recombination point X into the second module of PvdD
SEQ ID NO: 158 is the translation of SEQ ID NO: 157 having the residues substituted into
PvdD underlined
SEQ ID NO: 159 is the nucleotide sequence used to substitute the Phe specific A-domain
with the upstream recombination point B into the second module of PvdD
SEQ ID NO: 160 is the translation of SEQ ID NO: 159 having the residues substituted into
PvdD underlined
SEQ ID NO: 161 is the nucleotide sequence used to substitute the Phe specific A-domain
with the upstream recombination point C into the second module of PvdD
SEQ ID NO: 162 is the translation of SEQ ID NO: 161 having the residues substituted into
PvdD underlined
SEQ ID NO: 163 is the nucleotide sequence used to substitute the Phe specific A-domain
with the upstream recombination point D into the second module of PvdD
SEQ ID NO: 164 is the translation of SEQ ID NO: 163 having the residues substituted into
PvdD underlined
SEQ ID NO: 165 is the nucleotide sequence used to substitute the A-domain from an Ala
specifying module with the upstream recombination point X into the second module of
PvdD
SEQ ID NO: 166 is the translation of SEQ ID NO: 165 having the residues substituted into
PvdD underlined
SEQ ID NO: 167 is the nucleotide sequence used to the A-domain from an Ala specifying
module with the upstream recombination point B into the second module of PvdD
SEQ ID NO: 168 is the translation of SEQ ID NO: 167 having the residues substituted into
PvdD underlined
SEQ ID NO: 169 is the nucleotide sequence used to substitute the A-domain from an Ala
specifying module with the upstream recombination point D into the second module of
PvdD
SEQ ID NO: 170 is the translation of SEQ ID NO: 169 having the residues substituted into
PvdD underlined
SEQ ID NO: 171 is the nucleotide sequence used to substitute the A-domain from an Glu
specifying module with the upstream recombination point X into the second module of
PvdD
SEQ ID NO: 172 is the translation of SEQ ID NO: 171 having the residues substituted into
PvdD underlined
SEQ ID NO: 173 is the nucleotide sequence used to the A-domain from an Glu specifying
module with the upstream recombination point B into the second module of PvdD
SEQ ID NO: 174 is the translation of SEQ ID NO: 173 having the residues substituted into
PvdD underlined
SEQ ID NO: 175 is the nucleotide sequence used to substitute the A-domain from an Glu
specifying module with the upstream recombination point D into the second module of
PvdD
SEQ ID NO: 176 is the translation of SEQ ID NO: 175 having the residues substituted into
PvdD underlined
SEQ ID NO: 177 is the nucleotide sequence used to substitute the A-domain from an Arg
specifying module, named Arg1, with the upstream recombination point X into the second
module of PvdD
SEQ ID NO: 178 is the translation of SEQ ID NO: 177 having the residues substituted into
PvdD underlined
SEQ ID NO: 179 is the nucleotide sequence used to the A-domain from an Arg specifying
module, named Arg1, with the upstream recombination point B into the second module of
PvdD
SEQ ID NO: 180 is the translation of SEQ ID NO: 179 having the residues substituted into
PvdD underlined
SEQ ID NO: 181 is the nucleotide sequence used to substitute the A-domain from an Arg
specifying module, named Arg1, with the upstream recombination point D into the second
module of PvdD
SEQ ID NO: 182 is the translation of SEQ ID NO: 181 having the residues substituted into
PvdD underlined
SEQ ID NO: 183 is the nucleotide sequence used to substitute the A-domain from an Arg
specifying module, named Arg2, with the upstream recombination point X into the second
module of PvdD
SEQ ID NO: 184 is the translation of SEQ ID NO: 183 having the residues substituted into
PvdD underlined
SEQ ID NO: 185 is the nucleotide sequence used to the A-domain from an Arg specifying
module, named Arg2, with the upstream recombination point B into the second module of
PvdD
SEQ ID NO: 186 is the translation of SEQ ID NO: 185 having the residues substituted into
PvdD underlined
SEQ ID NO: 187 is the nucleotide sequence used to substitute the A-domain from an Arg
specifying module, named Arg2, with the upstream recombination point D into the second
module of PvdD
SEQ ID NO: 188 is the translation of SEQ ID NO: 187 having the residues substituted into
PvdD underlined
SEQ ID NO: 189 is the nucleotide sequence used to substitute the Ser specific A-domain
with the upstream recombination point B and downstream recombination point DI into the
second module of PvdD
SEQ ID NO: 190 is the translation of SEQ ID NO: 189 having the residues substituted into
PvdD underlined
SEQ ID NO: 191 is the nucleotide sequence used to substitute the Ser specific A-domain
with the upstream recombination point B and downstream recombination point D2 into the
second module of PvdD
SEQ ID NO: 192 is the translation of SEQ ID NO: 191 having the residues substituted into
PvdD underlined
SEQ ID NO: 193 is the nucleotide sequence used to substitute the Ser specific A-domain
with the upstream recombination point B and downstream recombination point D3 into the
second module of PvdD
SEQ ID NO: 194 is the translation of SEQ ID NO: 193 having the residues substituted into
PvdD underlined
SEQ ID NO: 195 is the nucleotide sequence used to substitute the Ser specific A-domain
with the upstream recombination point B and downstream recombination point D4 into the
second module of PvdD
SEQ ID NO: 196 is the translation of SEQ ID NO: 195 having the residues substituted into
PvdD underlined
SEQ ID NO: 197 is the nucleotide sequence used to substitute the Ser specific A-domain
with the upstream recombination point B and downstream recombination point D5 into the
second module of PvdD
SEQ ID NO: 198 is the translation of SEQ ID NO: 197 having the residues substituted into
PvdD underlined
SEQ ID NO: 199 is the nucleotide sequence used to substitute the Ser specific A-domain
with the upstream recombination point B and downstream recombination point D6 into the
second module of PvdD
SEQ ID NO: 200 is the translation of SEQ ID NO: 199 having the residues substituted into
PvdD underlined
SEQ ID NO: 201 is the nucleotide sequence used to substitute the Ser specific A-domain
with the upstream recombination point B and downstream recombination point D7 into the
second module of PvdD
SEQ ID NO: 202 is the translation of SEQ ID NO: 201 having the residues substituted into
PvdD underlined
SEQ ID NO: 203 is the nucleotide sequence used to substitute the fhorn specific A-domain
with the upstream recombination point B and downstream recombination point DI into the
second module of PvdD
SEQ ID NO: 204 is the translation of SEQ ID NO: 203 having the residues substituted into
PvdD underlined
SEQ ID NO: 205 is the nucleotide sequence used to substitute the fhorn specific A-domain
with the upstream recombination point B and downstream recombination point D2 into the
second module of PvdD
SEQ ID NO: 206 is the translation of SEQ ID NO: 205 having the residues substituted into
PvdD underlined
SEQ ID NO: 207 is the nucleotide sequence used to substitute the fhorn specific A-domain
with the upstream recombination point B and downstream recombination point D3 into the
second module of PvdD
SEQ ID NO: 208 is the translation of SEQ ID NO: 207 having the residues substituted into
PvdD underlined
SEQ ID NO: 209 is the nucleotide sequence used to substitute the fhorn specific A-domain
with the upstream recombination point B and downstream recombination point D4 into the
second module of PvdD
SEQ ID NO: 210 is the translation of SEQ ID NO: 209 having the residues substituted into
PvdD underlined
SEQ ID NO: 211 is the nucleotide sequence used to substitute the fhorn specific A-domain
with the upstream recombination point B and downstream recombination point D5 into the
second module of PvdD
SEQ ID NO: 212 is the translation of SEQ ID NO: 211 having the residues substituted into
PvdD underlined
SEQ ID NO: 213 is the nucleotide sequence used to substitute the fhorn specific A-domain
with the upstream recombination point B and downstream recombination point D6 into the
second module of PvdD
SEQ ID NO: 214 is the translation of SEQ ID NO: 213 having the residues substituted into
PvdD underlined
SEQ ID NO: 215 is the nucleotide sequence used to substitute the fhorn specific A-domain
with the upstream recombination point B and downstream recombination point D7 into the
second module of PvdD
SEQ ID NO: 216 is the translation of SEQ ID NO: 215 having the residues substituted into
PvdD underlined
SEQ ID NO: 217 is the nucleotide sequence used to substitute the Gly specific A-domain
with the upstream recombination point B and downstream recombination point DI into the
second module of PvdD
SEQ ID NO: 218 is the translation of SEQ ID NO: 217 having the residues substituted into
PvdD underlined
SEQ ID NO: 219 is the nucleotide sequence used to substitute the Gly specific A-domain
with the upstream recombination point B and downstream recombination point D2 into the
second module of PvdD
SEQ ID NO: 220 is the translation of SEQ ID NO: 219 having the residues substituted into
PvdD underlined
SEQ ID NO: 221 is the nucleotide sequence used to substitute the Gly specific A-domain
with the upstream recombination point B and downstream recombination point D3 into the
second module of PvdD
SEQ ID NO: 222 is the translation of SEQ ID NO: 221 having the residues substituted into
PvdD underlined
SEQ ID NO: 223 is the nucleotide sequence used to substitute the Gly specific A-domain
with the upstream recombination point B and downstream recombination point D4 into the
second module of PvdD
SEQ ID NO: 224 is the translation of SEQ ID NO: 223 having the residues substituted into
PvdD underlined
SEQ ID NO: 225 is the nucleotide sequence used to substitute the Gly specific A-domain
with the upstream recombination point B and downstream recombination point D5 into the
second module of PvdD
SEQ ID NO: 226 is the translation of SEQ ID NO: 225 having the residues substituted into
PvdD underlined
SEQ ID NO: 227 is the nucleotide sequence used to substitute the Gly specific A-domain
with the upstream recombination point B and downstream recombination point D6 into the
second module of PvdD
SEQ ID NO: 228 is the translation of SEQ ID NO: 227 having the residues substituted into
PvdD underlined
SEQ ID NO: 229 is the nucleotide sequence used to substitute the Gly specific A-domain
with the upstream recombination point B and downstream recombination point D7 into the
second module of PvdD
SEQ ID NO: 230 is the translation of SEQ ID NO: 229 having the residues substituted into
PvdD underlined
SEQ ID NO: 231 is the nucleotide sequence used to substitute the A-domain from
NZ_CP020028.1.cluster004_Leu with the upstream recombination point B into pET28:ProC-TTe
SEQ ID NO: 232 is the translation of SEQ ID NO: 231 having the residues substituted into
pET28:ProC-TTe underlined
SEQ ID NO: 233 is the nucleotide sequence used to substitute the A-domain from
NZ_CP020028.1.cluster004_Leu with the upstream recombination point D into pET28:ProC-TTe
SEQ ID NO: 234 is the translation of SEQ ID NO: 233 having the residues substituted into
pET28:ProC-TTe underlined
SEQ ID NO: 235 is the nucleotide sequence used to substitute the A-domain from
the sixth module of TycC with the upstream recombination point B into pET28:ProC-TTe
SEQ ID NO: 236 is the translation of SEQ ID NO: 235 having the residues substituted into
pET28:ProC-TTe underlined
SEQ ID NO: 237 is the nucleotide sequence used to substitute the A-domain from
the sixth module of TycC with the upstream recombination point D into pET28:ProC-TTe
SEQ ID NO: 238 is the translation of SEQ ID NO: 237 having the residues substituted into
pET28:ProC-TTe underlined
SEQ ID NO: 239 is the nucleotide sequence used to substitute the A-domain from
the SrfAC with the upstream recombination point B into pET28:ProC-TTe
SEQ ID NO: 240 is the translation of SEQ ID NO: 239 having the residues substituted into
pET28:ProC-TTe underlined
SEQ ID NO: 241 is the nucleotide sequence used to substitute the A-domain from
the SrfAC with the upstream recombination point D into pET28:ProC-TTe
SEQ ID NO: 242 is the translation of SEQ ID NO: 241 having the residues substituted into
pET28:ProC-TTe underlined
> SEQ ID NO: 9 JC
SRFARLPIPQTRQEMDNLPLSYAQERQWFLWQLEPESSAYHIPTALRLRGRLDIASLQRSFAALVERHESLRTRI
ARMGDEWVQVVSADVSLALEVEVQRGLDEQRLLERVEAEIARPFDLEQGPLLRVTLLEVDADEHVLVMVQHHIVS
DGWSMQLMVEELVQLYAAYSQGLDVVLPALPIQYADYALWQRSWMEAGEKERQLAYWTGLLGGEQPVIELPLDHP
RQPLRSYRGAQLDLELEPHLALALKQLVQRKGVTMFMLLLASFQALLHRYSGQADIRVGVPIANRNRVETERLIG
FFVNTQVLKADINGRMGFDELLAQARQRALEAQAHQDLPFEQLVEALQPERSLGHNPLFQVMFNHQADSRSANQG
VQLPGLSLERMEWRSSSVAFDLTLDVHEAEDGIWASFGYATDLFEASTVERLARHWQNLLRGIVAEPGRPVAELP
LLLDEERDCLSRAWAENADEGGLPPLVQLQIQEQARLRPQAQALALE
> SEQ ID NO: 11 DC
SRTTDAVSTIPLADRQQPLALSFAQERQWFLWQLEPESAAYHIPSALRLRGRLDVDALQRSFDSLVARHETLRTR
FRLEGGRSYQQVQPAVSVSIEREQFGEEGLIERIQAIVVQPFDLERGPLLRVNLLQLAEDDHVLVLVQHHIVSDG
WSMQVMVEELVQLYAAYSQGLDVVLPALPIQYADYALWQRSWMEAGEKERQLAYWTGLLGGEQPVLELPFDRPRP
ARQSHRGAQLGFELSRELVEAVRALAQREGASSFMLLLASFQALLYRYSGQADIRVGVPIANRNRVETERLIGFF
VNTQVLKADLDGRMGFDELLAQARQRALEAQAHQDLPFEQLVEALQPERNASHNPLFQVLFNHQSEIRSVTPEVQ
LEDLRLEGLAWDGQTAQFDLTLDIQEDENGIWASFDYATDLFDASTVERLAGHWRNLLRGIVANPRQRLGELPLL
DAPERRQTLSEWNPAQRECAVQGTLQQRFEEQARQRPQAVALILE
> SEQ ID NO: 13 LTT
SRFARLPIPQTRQEMDNLPLSYAQERQWFLWQLEPESSAYHIPTALRLRGRLDIASLQRSFAALVERHESLRTRI
ARMGDEWVQVVSADVSLALEVEVQRGLDEQRLLERVEAEIARPFDLEQGPLLRVTLLEVDADEHVLVMVQHHIVS
DGWSMQLMVEELVQLYAAYSQGLDVVLPALPIQYADYALWQRSWMEAGEKERQLAYWTGLLGGEQPVLELPFDRP
RPARQSHRGAQLGFELSRELVEAVRALAQREGASSFMLLLASFQALLYRYSGQADIRVGVPIANRNRVETERLIG
FFVNTQVLKADLDGRMGFDELLAQARQRALEAQAHQDLPFEQLVEALQPERNASHNPLFQVLFNHQSEIRSVTPE
VQLEDLRLEGLAWDGQTAQFDLTLDIQEDENGIWASFDYATDLFDASTVERLAGHWRNLLRGIVANPRQRLGELP
LLDAPERRQTLSEWNPAQRECAVQGTLQQRFEEQARQRPQAVALILE
> SEQ ID NO: 15 TLT
SRTTDAVSTIPLADRQQPLALSFAQERQWFLWQLEPESAAYHIPSALRLRGRLDVDALQRSFDSLVARHETLRTR
FRLEGGRSYQQVQPAVSVSIEREQFGEEGLIERIQAIVVQPFDLERGPLLRVNLLQLAEDDHVLVLVQHHIVSDG
WSMQVMVEELVQLYAAYSQGLDVVLPALPIQYADYALWQRSWMEAGEKERQLAYWTGLLGGEQPVIELPLDHPRQ
PLRSYRGAQLDLELEPHLALALKQLVQRKGVTMFMLLLASFQALLHRYSGQADIRVGVPIANRNRVETERLIGFF
VNTQVLKADINGRMGFDELLAQARQRALEAQAHQDLPFEQLVEALQPERNASHNPLFQVLFNHQSEIRSVTPEVQ
LEDLRLEGLAWDGQTAQFDLTLDIQEDENGIWASFDYATDLFDASTVERLAGHWRNLLRGIVANPRQRLGELPLL
DAPERRQTLSEWNPAQRECAVQGTLQQRFEEQARQRPQAVALILE
> SEQ ID NO: 17 TTL
SRTTDAVSTIPLADRQQPLALSFAQERQWFLWQLEPESAAYHIPSALRLRGRLDVDALQRSFDSLVARHETLRTR
FRLEGGRSYQQVQPAVSVSIEREQFGEEGLIERIQAIVVQPFDLERGPLLRVNLLQLAEDDHVLVLVQHHIVSDG
WSMQVMVEELVQLYAAYSQGLDVVLPALPIQYADYALWQRSWMEAGEKERQLAYWTGLLGGEQPVLELPFDRPRP
ARQSHRGAQLGFELSRELVEAVRALAQREGASSFMLLLASFQALLYRYSGQADIRVGVPIANRNRVETERLIGFF
VNTQVLKADLDGRMGFDELLAQARQRALEAQAHQDLPFEQLVEALQPERSLGHNPLFQVMFNHQADSRSANQGVQ
LPGLSLERMEWRSSSVAFDLTLDVHEAEDGIWASFGYATDLFEASTVERLARHWQNLLRGIVAEPGRPVAELPLL
LDEERDCLSRAWAENADEGGLPPLVQLQIQEQARLRPQAQALALE
> SEQ ID NO: 19 TLL
SRTTDAVSTIPLADRQQPLALSFAQERQWFLWQLEPESAAYHIPSALRLRGRLDVDALQRSFDSLVARHETLRTR
FRLEGGRSYQQVQPAVSVSIEREQFGEEGLIERIQAIVVQPFDLERGPLLRVNLLQLAEDDHVLVLVQHHIVSDG
WSMQVMVEELVQLYAAYSQGLDVVLPALPIQYADYALWQRSWMEAGEKERQLAYWTGLLGGEQPVIELPLDHPRQ
PLRSYRGAQLDLELEPHLALALKQLVQRKGVTMFMLLLASFQALLHRYSGQADIRVGVPIANRNRVETERLIGFF
VNTQVLKADINGRMGFDELLAQARQRALEAQAHQDLPFEQLVEALQPERSLGHNPLFQVMFNHQADSRSANQGVQ
LPGLSLERMEWRSSSVAFDLTLDVHEAEDGIWASFGYATDLFEASTVERLARHWQNLLRGIVAEPGRPVAELPLL
LDEERDCLSRAWAENADEGGLPPLVQLQIQEQARLRPQAQALALE
> SEQ ID NO: 21 LTL
SRFARLPIPQTRQEMDNLPLSYAQERQWFLWQLEPESSAYHIPTALRLRGRLDIASLQRSFAALVERHESLRTRI
ARMGDEWVQVVSADVSLALEVEVQRGLDEQRLLERVEAEIARPFDLEQGPLLRVTLLEVDADEHVLVMVQHHIVS
DGWSMQLMVEELVQLYAAYSQGLDVVLPALPIQYADYALWQRSWMEAGEKERQLAYWTGLLGGEQPVLELPFDRP
RPARQSHRGAQLGFELSRELVEAVRALAQREGASSFMLLLASFQALLYRYSGQADIRVGVPIANRNRVETERLIG
FFVNTQVLKADLDGRMGFDELLAQARQRALEAQAHQDLPFEQLVEALQPERSLGHNPLFQVMFNHQADSRSANQG
VQLPGLSLERMEWRSSSVAFDLTLDVHEAEDGIWASFGYATDLFEASTVERLARHWQNLLRGIVAEPGRPVAELP
LLLDEERDCLSRAWAENADEGGLPPLVQLQIQEQARLRPQAQALALE
> SEQ ID NO: 23 LLT
SRFARLPIPQTRQEMDNLPLSYAQERQWFLWQLEPESSAYHIPTALRLRGRLDIASLQRSFAALVERHESLRTRI
ARMGDEWVQVVSADVSLALEVEVQRGLDEQRLLERVEAEIARPFDLEQGPLLRVTLLEVDADEHVLVMVQHHIVS
DGWSMQLMVEELVQLYAAYSQGLDVVLPALPIQYADYALWQRSWMEAGEKERQLAYWTGLLGGEQPVIELPLDHP
RQPLRSYRGAQLDLELEPHLALALKQLVQRKGVTMFMLLLASFQALLHRYSGQADIRVGVPIANRNRVETERLIG
FFVNTQVLKADINGRMGFDELLAQARQRALEAQAHQDLPFEQLVEALQPERNASHNPLFQVLFNHQSEIRSVTPE
VQLEDLRLEGLAWDGQTAQFDLTLDIQEDENGIWASFDYATDLFDASTVERLAGHWRNLLRGIVANPRQRLGELP
LLDAPERRQTLSEWNPAQRECAVQGTLQQRFEEQARQRPQAVALILE
> SEQ ID NO: 25 DC region 3 with 6 mutations
LVEALQPERNASHNPLFQVMFNHQSEIRSVTPEVQLEDLRLEGLAWDGQTAQFDLTLDVHEAEDGIWASFGYATD
LFDASTVERLAGHWRNLLRGIVANPRQRLGELPLLDAPERRQTLSEWNPAQRECAVQGTLQQRFEEQARQRPQAV
ALILE
> SEQ ID NO: 27 DC region 3 with 12 mutations
LVEALQPERSLGHNPLFQVMFNHQSEIRSVTPEVQLEDLRLEGLAWDGQTAQFDLTLDVHEAEDGIWASFGYATD
LFEASTVERLARHWQNLLRGIVANPRQRLGELPLLDAPERRQTLSEWNPAQRECAVQGTLQQRFEEQARQRPQAV
ALILE
> SEQ ID NO: 29 DC region 3 with a loop mutation
LVEALQPERNASHNPLFQVLFNHQADSRSANQGVQLPGLSLERMEWRSSSVAFDLTLDIQEDENGIWASFDYATD
LFDASTVERLAGHWRNLLRGIVANPRQRLGELPLLDAPERRQTLSEWNPAQRECAVQGTLQQRFEEQARQRPQAV
ALILE
> SEQ ID NO: 31 DC region 3 with 6 mutations and a loop mutation
LVEALQPERNASHNPLFQVMFNHQADSRSANQGVQLPGLSLERMEWRSSSVAFDLTLDVHEAEDGIWASFGYATD
LFDASTVERLAGHWRNLLRGIVANPRQRLGELPLLDAPERRQTLSEWNPAQRECAVQGTLQQRFEEQARQRPQAV
ALILE
> SEQ ID NO: 33 DC region 3 with 6 mutations and mutations to
the edges of the loop
LVEALQPERNASHNPLFQVMFNHQADSRSVTPEVQLEDLRLEGLAWRSSSVAFDLTLDVHEAEDGIWASFGYATD
LFDASTVERLAGHWRNLLRGIVANPRQRLGELPLLDAPERRQTLSEWNPAQRECAVQGTLQQRFEEQARQRPQAV
ALILE
> SEQ ID NO: 35 DC region 3 with 12 mutations and a loop mutation
LVEALQPERSLGHNPLFQVMFNHQADSRSANQGVQLPGLSLERMEWRSSSVAFDLTLDVHEAEDGIWASFGYATD
LFEASTVERLARHWQNLLRGIVANPRQRLGELPLLDAPERRQTLSEWNPAQRECAVQGTLQQRFEEQARQRPQAV
ALILE
> SEQ ID NO: 37 DC region 3 with the C-A linker from a lysine
C-A domain
LVEALQPERNASHNPLFQVLFNHQSEIRSVTPEVQLEDLRLEGLAWDGQTAQFDLTLDIQEDENGIWASFDYATD
LFDASTVERLAGHWRNLLRGIVAEPGRPVAELPLLLDEERDCLSRAWAENADEGGLPPLVQLQIQEQARLRPQAQ
ALALE
> SEQ ID NO: 39 C-A domains from a Lys specific module
FARLPIPQTRQEMDNLPLSYAQERQWFLWQLEPESSAYHIPTALRLRGRLDIASLQRSFAALVERHESLRTRIAR
MGDEWVQVVSADVSLALEVEVQRGLDEQRLLERVEAEIARPFDLEQGPLLRVTLLEVDADEHVLVMVQHHIVSDG
WSMQLMVEELVQLYAAYSQGLDVVLPALPIQYADYALWQRSWMEAGEKERQLAYWTGLLGGEQPVIELPLDHPRQ
PLRSYRGAQLDLELEPHLALALKQLVQRKGVTMFMLLLASFQALLHRYSGQADIRVGVPIANRNRVETERLIGFF
VNTQVLKADINGRMGFDELLAQARQRALEAQAHQDLPFEQLVEALQPERSLGHNPLFQVMFNHQADSRSANQGVQ
LPGLSLERMEWRSSSVAFDLTLDVHEAEDGIWASFGYATDLFEASTVERLARHWQNLLRGIVAEPGRPVAELPLL
LDEERDCLSRAWAENADEGGLPPLVQLQIQEQARLRPQAQALALEGQALSYAELNARANRLAHCLIARGVGPDVL
VGIAVERSLDMVVGLLAILKAGGAYVPLDPTYPQDRLRHMLEDSAVGLLLSQEHLLPGLPLHEGLEVLSIDRLER
DASVSTDDPVVNLRPENLAYVIYTSGSTGKPKGVAISHAALAQFSRIASGYSALTPEDRILQFATLSFDGFVEQL
YPALTRGACVVLRGGDLWDTGELYRQIVEQGVTLADLPTAYWNLFLLDALAEPRRSYGALRQIHIGGEAMPLEGP
KLWRQAGMGRVRLLNTYGPTEATVVSSVFDCSAENARVGNASPIGQALPGRTLLVLDEHLGLLPVGPVGELYIAS
RAGLARAYHDRPGLTAERFLPDPFGEPGSRLYRTGDLARRRGDGVIEYMGRADHQVKIRGFRIELGEVEARLLDL
EGIREAAALALDGQLVAYLVAEGGEDETRQPALRERIRTALRASLPDYMVPSHLLFLERMPLSPNGKLDRRALPK
PD
> SEQ ID NO: 41 C-A domains from a Ser specific module
GQGNAAPRFIKADRSQPLGLSYAQQRQWFLWQLDPESTAYTIPAALRLSGSLDIAALEHSFSALIARHETLRTTF
RQQGEQAVQIIHAPRALTLMVESVPAGQTLEACVQQEMQRPFDLEKGPLLRVRLLNLATDEHVLILIQHHIVSDG
WSMPIMVDELVRLYEGYSQGREVVLTALDMQYADYALWQRNWMDAGEQARQLDYWKQQLGEQQPILELPADHPRP
VVQSHAGARLAVELAPALIDDLKQVARQQGVTLFMLLLASFQTLLHRHSGQPDIRVGVPIANRTRAETEGLIGFF
VNTQVLRAEFDLHTTFSELLQQVKQAALQAQAHQELPFEQLVEALQPQRSLSHSPLFQVMFNHQSQASAEVRALP
GLQVEALTSESYPAQFDLTLNTAEHDGGLSAGLTYATALFERSTIERMAGHWLALLQAICANAGQRIAEVPMLDA
AEQQQIVRDWNATAADFPGEHCLHSLIEAQVQATPDAPALIFAAEQLSYAQLNARANQLAHRLREAGVGPDVLVG
ICVERSVDMVIGLLAIIKAGGAYVPLDPDYPEDRLAYMMQDSGIGLLLTQSALLQGLPVQVQSLCLDQEGDWLDG
YSTANPINLSHPQNLAYVIYTSGSTGKPKGAGNSHRALVNRLHWMQKAYALDGSDTVLQKTPFSFDVSVWEFFWP
LLTGARLAVALPGDHRDPERLVQTIREHQVTTLHFVPSMLQAFLTHPQVEGCNSLRRVVCSGEALPSELAGQVLK
RLPQTGLFNLYGPTEAAIDVTHWTCTKDDVLSVPIGRPIDNLKTHILDDGLLPAAQGVSAELYLGGIGLARGYHN
RAALTAERFVPDPFDEQGGRLYRTGDLARYRDEGVIEYAGRIDHQVKIRGLRIELGEIEASLLEHGSVQEAVVID
VDGPSGKQLAAYLVAEHSGDNLRDALKVYLKETLPDYMVPTHFVWLASMPLSANGKLDRKALPTPD
> SEQ ID NO: 43 C-A domains from a fhOrn specific module
QAPGAPTAPALLPVGRDQPLPLSYAQERQWFLWQLEPQSAAYHIPSALRLKGQLDLGALQRSFDTLLARHESLRT
HLRQERDRTVQIISPQLSLQIAHAEVQEAQLKARVEAEIAQPFNLEQGPLLRVSLLRIAADEHVLVLVQHHIVSD
GWSMQLMVEELVQLYAAYSQGQVLQWPALPIQYADYAVWQRNWMEAGEKARQLAYWRDMLGGEQSVLALPFDHPR
PAVQSHRGARLAFELPGALTQGLKALAKQQDVTLFMLLLASFQTLLHRYSGQEEIRVGVPIANRNRSETERLIGF
FVNTQVLKADLHGQMSVEQLLQQARQRALDAQAHQDLPFEQLVEALQPERSLSHNPLFQVMFNHQTDVGQAQVQQ
QLPNLSVEGLEWESKTAHFDLDLDIQESTEGIWATLGYAQDLFEASTVQRMARHWQNLLQGMVADPRQNLSQLNL
LDNAERQQILQLWNQSDAGFSAKRLVHELVADRAGETPEAVAVKFGEQQLTYGELDRQANRLAHALIARGVGPEV
RVAIAMPRSAEIMVAFLAVMKAGGVYVPLDIEYPRDRLLYMMQDSRARLLLTHSAVQQRLPIPDGLEALAVDQAQ
AWSADDDTAPEVALDGDNLAYVIYTSGSTGMPKGVAVSHGPLVAHIIATGERYETSPADCELHFMSFAFDGSHEG
WMHPLINGASVLIRDDSLWLPEYTYQQMHRHHVTMAVFPPVYLQQLAEHAERDGNPPKVRVYCFGGDAVAQASYD
LAWRALKPTYLFNGYGPTETVVTPLLWKARRGDPCGAVYAPIGTLLGNRSGYVLDAQLNLQPIGVAGELYLGGEG
VARGYLERPALTAERFVPDPFGKPGSRVYRSGDLTRGRPDGVVDYLGRVDHQVKIRGFRIELGEIEARLREQDSV
GETVVVAQEGPSGKQLVAYVVPLDPLLVDDAVAQSTCREALRRALKTRLPDYMVPTHLMFLERMPLTPNGKLDRK
GLPRPD
> SEQ ID NO: 45 Linker plus A-domain from a Lys specific module
LVEALQPERNASHNPLFQVLFNHQSEIRSVTPEVQLEDLRLEGLAWDGQTAQFDLTLDIQEDENGIWASFDYATD
LFDASTVERLAGHWRNLLRGIVAEPGRPVAELPLLLDEERDCLSRAWAENADEGGLPPLVQLQIQEQARLRPQAQ
ALALEGQALSYAELNARANRLAHCLIARGVGPDVLVGIAVERSLDMVVGLLAILKAGGAYVPLDPTYPQDRLRHM
LEDSAVGLLLSQEHLLPGLPLHEGLEVLSIDRLERDASVSTDDPVVNLRPENLAYVIYTSGSTGKPKGVAISHAA
LAQFSRIASGYSALTPEDRILQFATLSFDGFVEQLYPALTRGACVVLRGGDLWDTGELYRQIVEQGVTLADLPTA
YWNLFLLDALAEPRRSYGALRQIHIGGEAMPLEGPKLWRQAGMGRVRLLNTYGPTEATVVSSVFDCSAENARVGN
ASPIGQALPGRTLLVLDEHLGLLPVGPVGELYIASRAGLARAYHDRPGLTAERFLPDPFGEPGSRLYRTGDLARR
RGDGVIEYMGRADHQVKIRGFRIELGEVEARLLDLEGIREAAALALDGQLVAYLVAEGGEDETRQPALRERIRTA
LRASLPDYMVPSHLLFLERMPLSPNGKLDRRALPKPD
> SEQ ID NO: 47 Ser_X
LVEALQPERNASHNPLFQVLENHQSEIRSVTPEVQLEDLRLEGLAWDGQTAQFDLTLDIQEDENGIWASFDYATD
LFDASTVERLAGHWRNLLRGIVANAGQRIAEVPMLDAAEQQQIVRDWNATAADFPGEHCLHSLIEAQVQATPDAP
ALIFAAEQLSYAQLNARANQLAHRLREAGVGPDVLVGICVERSVDMVIGLLAIIKAGGAYVPLDPDYPEDRLAYM
MQDSGIGLLLTQSALLQGLPVQVQSLCLDQEGDWLDGYSTANPINLSHPQNLAYVIYTSGSTGKPKGAGNSHRAL
VNRLHWMQKAYALDGSDTVLQKTPFSFDVSVWEFFWPLLTGARLAVALPGDHRDPERLVQTIREHQVTTLHFVPS
MLQAFLTHPQVEGCNSLRRVVCSGEALPSELAGQVLKRLPQTGLFNLYGPTEAAIDVTHWTCTKDDVLSVPIGRP
IDNLKTHILDDGLLPAAQGVSAELYLGGIGLARGYHNRAALTAERFVPDPFDEQGGRLYRTGDLARYRDEGVIEY
AGRIDHQVKIRGLRIELGEIEASLLEHGSVQEAVVIDVDGPSGKQLAAYLVAEHSGDNLRDALKVYLKETLPDYM
VPTHFVWLASMPLSANGKLDRKALPTPD
> SEQ ID NO: 49 fhOrn_X
LVEALQPERNASHNPLFQVLFNHQSEIRSVTPEVQLEDLRLEGLAWDGQTAQFDLTLDIQEDENGIWASFDYATD
LEDASTVERLAGHWRNLLRGIVADPRQNLSQLNLLDNAERQQILQLWNQSDAGFSAKRLVHELVADRAGETPEAV
AVKFGEQQLTYGELDRQANRLAHALIARGVGPEVRVAIAMPRSAEIMVAFLAVMKAGGVYVPLDIEYPRDRLLYM
MQDSRARLLLTHSAVQQRLPIPDGLEALAVDQAQAWSADDDTAPEVALDGDNLAYVIYTSGSTGMPKGVAVSHGP
LVAHIIATGERYETSPADCELHFMSFAFDGSHEGWMHPLINGASVLIRDDSLWLPEYTYQQMHRHHVTMAVFPPV
YLQQLAEHAERDGNPPKVRVYCFGGDAVAQASYDLAWRALKPTYLFNGYGPTETVVTPLLWKARRGDPCGAVYAP
IGTLLGNRSGYVLDAQLNLQPIGVAGELYLGGEGVARGYLERPALTAERFVPDPFGKPGSRVYRSGDLTRGRPDG
VVDYLGRVDHQVKIRGFRIELGEIEARLREQDSVGETVVVAQEGPSGKQLVAYVVPLDPLLVDDAVAQSTCREAL
RRALKTRLPDYMVPTHLMFLERMPLTPNGKLDRKGLPRPD
> SEQ ID NO: 51 l_CP008696.1.cluster009_A1
LVEALQPERNASHNPLFQVLFNHQSEIRSVTPEVQLEDLRLEGLAWDGQTAQFDLTLDIQEDENGIWASFDYATD
LFDASTVERLAGHWRNLLRGIVAQPGQRLGDLPLLAASEQNKLLHEWAPASVEFPSEHGVHQRVEAQARKNPEAE
ALLFAGQSLNYQALNARANRLAHKLIELGVGPEVRVGVAMQRTPEMVVALLAVLKAGGAYVPLDPDYPQDRLAHM
LRDSQAQILLTESALLSLLPAVESLQTLQLDAQPGWLDGYSPDNPAPRATADNLAYVIYTSGSTGLPKGVAIAHR
NVLALIDWSSRVYSADDLQGVLASTSICFDLSVWELFVTLSSGGFIVLARNALELPELVDRDRVRLINTVPSAIA
ALQRSGQIPPGVRIINLAGEPLKQALVDSLYQQPGLQHVYDLYGPSEDTTYSTYTRREAGGQANIGRAISNTQSY
ILSPDLQPVPVGSAGELYLAGAGVTRGYLARPGLTAEKFVPNPFSSDGGRVYRTGDLTRYRADGVIEYIGRIDHQ
VKVRGFRIELGEIEARLVQQAAVREAFVLAQDGDNGQQLVAYIVPSETTEAIEAQAALRENIKAALKAHLPDYMV
PTYLLFLEALPLTPNGKLDRKALPKVD
> SEQ ID NO: 53 2_CP006852.1.cluster006_A4
LVEALQPERNASHNPLFQVLFNHQSEIRSVTPEVQLEDLRLEGLAWDGQTAQFDLTLDIQEDENGIWASFDYATD
LFDASTVERLAGHWRNLLRGIVADTQQRIGQLPLLDDQEQQAVIHDWNATARDYPSQRCVHQLIEAQVARTPDAP
ALVFGQQRLSYAQLNRRANRLAHRLIAAGVGPDVLVGLALERSIEMVVGLLAVLKAGGAYVPLDPEYPRERLAYM
LEDSGVKLLLTQAHLLQQLPIPQGLDHLVLGESWFEGYSDSNPGIVLDGENLAYVIYTSGSTGQPKGAGNRHSAL
TNRLQWMQEAYGLGASDTVLQKTPFSFDVSVWEFFWPLMSGARLVVAAPGDHRDPARLISVITAEQVTTVHFVPS
MLQAFLQDAAVTRCQSLQRIVCSGEALPVDAQQQVFAKLPQAGLYNLYGPTEAAIDVTHWTCVDEGHDTVPIGEP
IANLRTHVLDADLSPVPVGVAGELYLGGAGLARSYHRRPGLTAERFVPCPFHPGARLYRSGDRVRQRADGVIEYL
GRLDHQVKLRGLRIELGEIEARLLEHPAVREASVQVVDGKQLVAYVVLQPNGDDWRERLSTHLASHLPDYMVPAQ
WVVLEHMPLSPNGKLDRKALPKPE
> SEQ ID NO: 55 3_CP011507.1.cluster002_A1
LVEALQPERNASHNPLFQVLFNHQSEIRSVTPEVQLEDLRLEGLAWDGQTAQFDLTLDIQEDENGIWASFDYATD
LFDASTVERLAGHWRNLLRGIVADCDGRVGELPLLDDAQWQQRVHAWNNTHQAFLPDVGVHRLLEAQAQARPDAT
ALVONGQALSYAQLNRRANRLAHRLRAAGVGPDVLVAVALDRSVDMVLALLATLKAGGAYVPLDPQFPADRLAFM
LEDSRARVLLTAGDLHQRLPVAADQQVLFISEQEDARHSSDNPHVELSGEHLAYVIYTSGSTGKPKGVMVRHGAL
SSFTQGMADTLSIDADARLLSLTTFSFDIFALELYVPLSVGATVVLADKEVSLDPEAILSLLHDQAINVVQATPS
TWRMLLDSERRAVLHGVKCLCGGEALPADLAQRMLAQQGTVWNLYGPTETTIWSAAHPLVEPLPFVGRPIANTSL
FILNAELTLSPVGTSGELLIGGVGLARGYHGRAAMTAERFVPNPFARNGERLYRTGDLARYRVDGVVEYIGRVDH
QVKVRGFRIELGEIEACLREQSDVREAVVVAENDQLLAYLVTHTATSEADQGALREALKAALRDVLPDYMVPAHM
LFLARLPLTPNGKLDRKALPKPD
> SEQ ID NO: 57 4_CP003041.1.cluster006_A2
LVEALQPERNASHNPLFQVLFNHQSEIRSVTPEVQLEDLRLEGLAWDGQTAQFDLTLDIQEDENGIWASFDYATD
LFDASTVERLAGHWRNLLRGIVANPRQQLSQLSLLDATEQQQILQLWNRTESGFSAERLVHELVGDRARETPDAV
AVKFDAQTLTYGELDRQANRLAHALIARGVGPEVRVAIAMPRSAEIMVAFLAVMKAGGVYVPLDIEYPRDRLLYM
MQDSRSKMLLTHSAVQHRLPIPDGLDVLAVDQVQAWSDYSDTAPTVALDGDNLAYVIYTSGSTGLPKGVAVSHGP
LVAHIIATGERYETSPADCELHFMSFAFDGSHEGWMHPLINGASVLIRDDSLWLPEYTYEQMHRHNVTMAVFPPV
YLQQLAEHAERDGNPPAVRVYCFGGDAVAQASYDLAWRALKPKYLFNGYGPTETVVTPLLWKARKGDPCGAVYAP
IGTLLGNRSGYVLDAQLNLQPIGVAGELYLGGEGVARGYLERPALTAEREVPDPFGKPGSRVYRSGDLTRGRPDG
VVDYLGRVDHQVKIRGFRIELGEIEARLREQASVGETVVVAQEGPTGKQLVAYVVPLDRTLLDDAVAQSTGRETL
RRALKTRLPDYMVPTHLMFLERMPLTPNGKLDRKGLPLPD
> SEQ ID NO: 59 5_AP013068.1.cluster003_A1
LVEALQPERNASHNPLFQVLFNHQSEIRSVTPEVQLEDLRLEGLAWDGQTAQFDLTLDIQEDENGIWASFDYATD
LFDASTVERLAGHWRNLLRGIVANPELAVGELPLLDAEELRQQLQGWNATARDYGCETVHRLFEAQVASQPDAPA
LAFGTEHLSYAQLNARANRLAHKLRSLGVGPESLVGVACERSVELVVGLLAVLKAGGAYVPFDPEYPRDRLAYLE
DDSAIRLLLTQSHLLGELPLPEGVTSLCLDQDSDALEAFSGANPEVPLAPNNLAYVIYTSGSTGKPKGAGNTHGA
LHNRLAWMQEAYALDAGDSVLQKTPFSFDVSVWEFFWPLMVGARLAVAAPGDHRDPSRLLALIEAHRVTTLHFVP
SMLQAFVSQLALEEQGARQCASLKRIVCSGEALPAELQGQVFAELPGVGLFNLYGPTEAAIDVTHWTCREEGRDS
VPIGQPIANLATHILDARLNPVPVGVAGELYLAGAGLARGYHRRAGLSAERFVANPFAPGERMYRTGDLARYRTD
GVIEYLGRIDHQVKIRGFRIELGEIEARLQSHAGVREAVVVAVDGASGKQLVAYLVAAEAGAEEGALRESIKAHL
GATLPDYMVPAQFVLLTAMPLSPNGKLDRKALPKPD
> SEQ ID NO: 61 6_CP010945.1.cluster006_A1
LVEALQPERNASHNPLFQVLFNHQSEIRSVTPEVQLEDLRLEGLAWDGQTAQFDLTLDIQEDENGIWASFDYATD
LFDASTVERLAGHWRNLLRGIVAQPKTAIGDLQLLAPSEHDQQENWSAAPCTPASQWLPELLGEQARLTPERTAL
MWDGGSLDFAELHAQANRLAHYLRDKGVGPDVCVAIAAERSPQLLIGLLAIIKAGGAYVPLDPDYPAERLAYMLR
DSGVELLLTQTQLLDRLPATDGVSVIAMDALHLENWPSQAPGLHLHGDNLAYVIYTSGSTGQPKGVGNTHTALAE
RLQWMQNTYRLNDTDVLMQKAPISFDVSVWECFWPLITGARLLIAGPGEHRDPHRIAQLVQQYGVTTLHFVPPLL
SLFIDEPLTAECTSLRRVFSGGEALPAELRNRVLEQLPAVQLHNRYGPTETAINVTHWQCSAADGERSPIGRPLG
NVICRVLDSDLNPVPAGVPGELCISGIGLARGYLGRPGLTAERFVVDPLSEQGARLYRTGDRARWTAEGVIEYLG
RLDQQVKVRGFRVEPEEIEARLLAQNGVAQAVVLVRETAAGAQLIGYYTATANSEAEDTQTARLKTALAVELPEY
MVPAQLMRLGEMPLSPSGKLDRRALPEPR
> SEQ ID NO: 63 7_AM181176.4.cluster005_A2
LVEALQPERNASHNPLFQVLFNHQSEIRSVTPEVQLEDLRLEGLAWDGQTAQFDLTLDIQEDENGIWASFDYATD
LFDASTVERLAGHWRNLLRGIVAEPQRPVAALPLLMPAEWQRTVVEWNRTEMDVPQHLTFAQLFEQQAERTPQRD
ALCFEGQRLSYAELNRRANQVAHYLRAQGVVANCPVALCVERSLELLIGLLGILKAGGAYVPLDPGYPAERLAYM
LEDAQPALFLGQQGLLEQLGGDLPRLRLDADAALLAAQPESNPAALAGPDDLAYIMYTSGSTGKPKGTLVTHTSV
VNLAWARIHGLYRRYTDQPMRTSFNYSFAFDSSVAELILLLDGHSLYLTPEDVRYDPAALAQFFQETRLDAFECT
PAQLKSLLETDGVRRGETYLPRFVLFGGDAVDAQLWQRLPSISGSRFFNTYGPTECTVDATGCAVDDFPQRPIIG
RPIANVRTYVLDAFLNPMPVGVPGELHIGGAGVTLGYLNRAEQTAKVFINDPFSPLPQARMYKSGDLVRWLPDGQ
LEYLGRMDHQVKIRGFRVELGEIEALIGAQPGVRQAVVLAREDVQGDKRLVAYVTCDQPADMNAWRNRLGAALPD
YMVPSAFVVLDELPLTDNGKLNRKALPAPD
> SEQ ID NO: 65 8_CP000680.1.cluster003_A3
LVEALQPERNASHNPLFQVLFNHQSEIRSVTPEVQLEDLRLEGLAWDGQTAQFDLTLDIQEDENGIWASFDYATD
LFDASTVERLAGHWRNLLRGIVAMPQASLADLPLLSESEVAEVEAWNAPIPVPNSIQLLPERIAEQARLRPTAIA
LVHGQQRLSFAELEARANCLAHQLIARGVGAEVRVGVALERGIELFVALLAVLKAGGAYVPLDPDYPGERLRYML
EDAGVKLLLSHQAALPRLPEVAGIEVLDLDHLPLNDQPEQAPEVNIHHEQLAYLIYTSGSTGKPKGVAVAHGAIA
MHCQAIGERYELTAEDRELHFLSVSFDGAHERWLTPLSHGARVVIRDQQLWSVQQTYDCLIEEGISVVALPPSYL
RQLAEWAEQCGKAPGVKTYCFAGEAFSRELLQQVIRSLQPQWIINGYGPTETVVTPTTWRVPAATADFDTAYAPI
GDRVGARQGYVLDADLNLLPVGVAGELYLGGLLARGYLDRPGATAERFVPNPYRPGERLYRTGDRVRLGADGQLE
YLGRLDQQIKLRGFRIEIGEVEAALKACAGVGESLVVVKDSAAGKRLVGYVSGQALSESELKAQLKQRLPSHMVP
SHILALERLPLLPNGKLDRQSLPEPQ
> SEQ ID NO: 67 9_CP011972.1.cluster002_A4
LVEALQPERNASHNPLFQVLFNHQSEIRSVTPEVQLEDLRLEGLAWDGQTAQFDLTLDIQEDENGIWASFDYATD
LFDASTVERLAGHWRNLLRGIVAAPDAPLFSLGALTVELPGEVREPAPQVLQLWDRQVESQPDALAARCLDRTLN
TRALDQAANQLAHHLIGRGVCESQPVAVLMERSLDWLTAVLAIFKAGGVYMPLDIKAPDARLQQMLSNAKAKVLL
CAEGDVRQTSLDVAGCEGLAWTPALWQDLPVSRPDITLSADSAAYVIHTSGSTGQPKGVVVSQGALASYVHGVLE
QLQLAPEASMALVSTIAADLGHTVLFGALCSGRTLHVLTESLGFDPDAFAAYMAEHQVGVLKIVPGHLAALLQAA
QPADVLPQHALIVGGEACSPALVEQVRQLKPGCRVINHYGPSETTVGVLTHEVPALSELNAIPCGSELVREEAGT
GLQKAEALLPPSRASSLPQEPAKVPVGKPLPGASAYVLDDVLNPVATQVAGELYIGGDSVARGYIGQPALTAERF
VPDPFAQDGSRVYRSGDRMRRNHQGLLEFIGRADDQVKVRGYRVEPAEVARVLLSLPSVAQVSVLALPVDEDESR
LQLVAYCVAATGASLTIDSLREQLTARLPDYMVPAQILLLDQLPLTANGKLDKRALPKPG
> SEQ ID NO: 69 Partial A-domain Ser 1
LVEALQPERNASHNPLFQVLENHQSEIRSVTPEVQLEDLRLEGLAWDGQTAQFDLTLDIQEDENGIWASFDYATD
LFDASTVERLAGHWRNLLRGIVANPRQRLGELPLLDAPERRQTLSEWNPAQRECAVQGTLQQRFEEQARQRPQAV
ALILDEQRLSYGELNARANRLAHCLIARGVGADVPVGLALERSLDMLVGLLAILKAGGAYLPLDPAAPEERLAHI
LDDSGVRLLLTQGHLLERLPRQAGVEVLAIDGLVLDGYAESDPLPTLSADNLAYVIYTSGSTGKPKGTLLTHRNA
LRLFSATEAWFGFGASDTVLQKTPFSFDVSVWEFFWPLMSGARLVVAAPGDHRDPARLISVITAEQVTTVHFVPS
MLQAFLQDAAVTRCQSLQRIVCSGEALPVDAQQQVFAKLPQAGLYNLYGPTEAAIDVTHWTCVDEGHDTVPIGEP
IPDLSWYILDRDLNPVPRGAVGELYIGRAGLARGYLRRPGLSATRFVPNPFPGGAGERLYRTGDLARFQADGNIE
YIGRIDHQVKVRGFRIELGEIEAALAGLAGVRDAVVLAHDGVGGTQLVGYVVADSAEDAERLRESLRESLKRHLP
DYMVPAHLMLLERMPLTVNGKLDRQALPQPD
> SEQ ID NO: 71 Partial A-domain Lys 1
LVEALQPERNASHNPLFQVLFNHQSEIRSVTPEVQLEDLRLEGLAWDGQTAQFDLTLDIQEDENGIWASFDYATD
LFDASTVERLAGHWRNLLRGIVANPRQRLGELPLLDAPERRQTLSEWNPAQRECAVQGTLQQRFEEQARQRPQAV
ALILDEQRLSYGELNARANRLAHCLIARGVGADVPVGLALERSLDMLVGLLAILKAGGAYLPLDPAAPEERLAHI
LDDSGVRLLLTQGHLLERLPRQAGVEVLAIDGLVLDGYAESDPLPTLSADNLAYVIYTSGSTGKPKGTLLTHRNA
LRLFSATEAWFGFTPEDRILQFATLSFDGFVEQLYPALTRGACVVLRGGDLWDTGELYRQIVEQGVTLADLPTAY
WNLFLLDALAEPRRSYGALRQIHIGGEAMPLEGPKLWRQAGMGRVRLLNTYGPTEATVVSSVFDCSAENARVGNA
SPIGQALPDLSWYILDRDLNPVPRGAVGELYIGRAGLARGYLRRPGLSATRFVPNPFPGGAGERLYRTGDLARFQ
ADGNIEYIGRIDHQVKVRGFRIELGEIEAALAGLAGVRDAVVLAHDGVGGTQLVGYVVADSAEDAERLRESLRES
LKRHLPDYMVPAHLMLLERMPLTVNGKLDRQALPQPD
> SEQ ID NO: 73 Partial A-domain Ser 2
LVEALQPERNASHNPLFQVLFNHQSEIRSVTPEVQLEDLRLEGLAWDGQTAQFDLTLDIQEDENGIWASFDYATD
LFDASTVERLAGHWRNLLRGIVANPRQRLGELPLLDAPERRQTLSEWNPAQRECAVQGTLQQRFEEQARQRPQAV
ALILDEQRLSYGELNARANRLAHCLIARGVGADVPVGLALERSLDMLVGLLAILKAGGAYLPLDPAAPEERLAHI
LDDSGVRLLLTQGHLLERLPRQAGVEVLAIDGLVLDGYAESDPLPTLSADNLAYVIYTSGSTGKPKGTLLTHSAL
TNRLQWMQEAYGLGASDTVLQKTPFSFDVSVWEFFWPLMSGARLVVAAPGDHRDPARLISVITAEQVTTVHFVPS
MLQAFLQDAAVTRCQSLQRIVCSGEALPVDAQQQVFAKLPQAGLYNLYGITETTVHVTYRPVSEADLKGGLVSPI
GGTIPDLSWYILDRDLNPVPRGAVGELYIGRAGLARGYLRRPGLSATRFVPNPFPGGAGERLYRTGDLARFQADG
NIEYIGRIDHQVKVRGFRIELGEIEAALAGLAGVRDAVVLAHDGVGGTQLVGYVVADSAEDAERLRESLRESLKR
HLPDYMVPAHLMLLERMPLTVNGKLDRQALPQPD
> SEQ ID NO: 75 Partial A-domain Lys 2
LVEALQPERNASHNPLFQVLFNHQSEIRSVTPEVQLEDLRLEGLAWDGQTAQFDLTLDIQEDENGIWASFDYATD
LFDASTVERLAGHWRNLLRGIVANPRQRLGELPLLDAPERRQTLSEWNPAQRECAVQGTLQQRFEEQARQRPQAV
ALILDEQRLSYGELNARANRLAHCLIARGVGADVPVGLALERSLDMLVGLLAILKAGGAYLPLDPAAPEERLAHI
LDDSGVRLLLTQGHLLERLPRQAGVEVLAIDGLVLDGYAESDPLPTLSADNLAYVIYTSGSTGKPKGTLLTHAAL
AQFSRIASGYSALTPEDRILQFATLSFDGFVEQLYPALTRGACVVLRGGDLWDTGELYRQIVEQGVTLADLPTAY
WNLFLLDALAEPRRSYGALRQIHIGGEAMPLEGPKLWRQAGMGRVRLLNTYGITETTVHVTYRPVSEADLKGGLV
SPIGGTIPDLSWYILDRDLNPVPRGAVGELYIGRAGLARGYLRRPGLSATRFVPNPFPGGAGERLYRTGDLARFQ
ADGNIEYIGRIDHQVKVRGFRIELGEIEAALAGLAGVRDAVVLAHDGVGGTQLVGYVVADSAEDAERLRESLRES
LKRHLPDYMVPAHLMLLERMPLTVNGKLDRQALPQPD
> SEQ ID NO: 77 Partial A-domain Ser 3
LVEALQPERNASHNPLFQVLFNHQSEIRSVTPEVQLEDLRLEGLAWDGQTAQFDLTLDIQEDENGIWASFDYATD
LFDASTVERLAGHWRNLLRGIVANPRQRLGELPLLDAPERRQTLSEWNPAQRECAVQGTLQQRFEEQARQRPQAV
ALILDEQRLSYGELNARANRLAHCLIARGVGADVPVGLALERSLDMLVGLLAILKAGGAYLPLDPAAPEERLAHI
LDDSGVRLLLTQGHLLERLPRQAGVEVLAIDGLVLDGYAESDPLPTLSADNLAYVIYTSGSTGKPKGTLLTHRNA
LRLFSATEAWFGFDERDVWTLFHSYAFDVSVWEFFWPLMSGARLVVAAPGDHRDPARLISVITAEQVTTVHFVPS
MLQAFLQDAAVTRCQSLQRIVCSGEALPVDAQQQVFAKLPQAGLYNLYGPTEAAIDVTYRPVSEADLKGGLVSPI
GGTIPDLSWYILDRDLNPVPRGAVGELYIGRAGLARGYLRRPGLSATRFVPNPFPGGAGERLYRTGDLARFQADG
NIEYIGRIDHQVKVRGFRIELGEIEAALAGLAGVRDAVVLAHDGVGGTQLVGYVVADSAEDAERLRESLRESLKR
HLPDYMVPAHLMLLERMPLTVNGKLDRQALPQPD
> SEQ ID NO: 79 Partial A-domain Lys 3
LVEALQPERNASHNPLFQVLFNHQSEIRSVTPEVQLEDLRLEGLAWDGQTAQFDLTLDIQEDENGIWASFDYATD
LFDASTVERLAGHWRNLLRGIVANPRQRLGELPLLDAPERRQTLSEWNPAQRECAVQGTLQQRFEEQARQRPQAV
ALILDEQRLSYGELNARANRLAHCLIARGVGADVPVGLALERSLDMLVGLLAILKAGGAYLPLDPAAPEERLAHI
LDDSGVRLLLTQGHLLERLPRQAGVEVLAIDGLVLDGYAESDPLPTLSADNLAYVIYTSGSTGKPKGTLLTHRNA
LRLFSATEAWFGFDERDVWTLFHSYAFDGFVEQLYPALTRGACVVLRGGDLWDTGELYRQIVEQGVTLADLPTAY
WNLFLLDALAEPRRSYGALRQIHIGGEAMPLEGPKLWRQAGMGRVRLLNTYGPTEATVVSTYRPVSEADLKGGLV
SPIGGTIPDLSWYILDRDLNPVPRGAVGELYIGRAGLARGYLRRPGLSATRFVPNPFPGGAGERLYRTGDLARFQ
ADGNIEYIGRIDHQVKVRGFRIELGEIEAALAGLAGVRDAVVLAHDGVGGTQLVGYVVADSAEDAERLRESLRES
LKRHLPDYMVPAHLMLLERMPLTVNGKLDRQALPQPD
> SEQ ID NO: 81 Partial A-domain Ser 4
LVEALQPERNASHNPLFQVLFNHQSEIRSVTPEVQLEDLRLEGLAWDGQTAQFDLTLDIQEDENGIWASFDYATD
LFDASTVERLAGHWRNLLRGIVANPRQRLGELPLLDAPERRQTLSEWNPAQRECAVQGTLQQRFEEQARQRPQAV
ALILDEQRLSYGELNARANRLAHCLIARGVGADVPVGLALERSLDMLVGLLAILKAGGAYLPLDPAAPEERLAHI
LDDSGVRLLLTQGHLLERLPRQAGVEVLAIDGLVLDGYSDSNPGIVLDGENLAYVIYTSGSTGQPKGAGNRHSAL
TNRLQWMQEAYGLGASDTVLQKTPFSFDVSVWEFFWPLMSGARLVVAAPGDHRDPARLISVITAEQVTTVHFVPS
MLQAFLQDAAVTRCQSLQRIVCSGEALPVDAQQQVFAKLPQAGLYNLYGPTEAAIDVTHWTCVDEGHDTVPIGEP
IANLRTHVLDADLSPVPVGVAGELYLGGAGLARSYHRRPGLTAERFVPCPFHPGARLYRSGDRVRQRADGVIEYL
GRLDHQVKLRGLRIELGEIEARLLEHPAVREASVQVVDGKQLVAYVVLQPNGDDWRERLSTHLASHLPDYMVPAQ
WVVLEHMPLSPNGKLDRKALPKPE
> SEQ ID NO: 83 Partial A-domain Lys 4
LVEALQPERNASHNPLFQVLFNHQSEIRSVTPEVQLEDLRLEGLAWDGQTAQFDLTLDIQEDENGIWASFDYATD
LFDASTVERLAGHWRNLLRGIVANPRQRLGELPLLDAPERRQTLSEWNPAQRECAVQGTLQQRFEEQARQRPQAV
ALILDEQRLSYGELNARANRLAHCLIARGVGADVPVGLALERSLDMLVGLLAILKAGGAYLPLDPAAPEERLAHI
LDDSGVRLLLTQGHLLERLPRQAGVEVLAIDGLVLDGSVSTDDPVVNLRPENLAYVIYTSGSTGKPKGVAISHAA
LAQFSRIASGYSALTPEDRILQFATLSFDGFVEQLYPALTRGACVVLRGGDLWDTGELYRQIVEQGVTLADLPTA
YWNLFLLDALAEPRRSYGALRQIHIGGEAMPLEGPKLWRQAGMGRVRLLNTYGPTEATVVSSVFDCSAENARVGN
ASPIGQALPGRTLLVLDEHLGLLPVGPVGELYIASRAGLARAYHDRPGLTAERFLPDPFGEPGSRLYRTGDLARR
RGDGVIEYMGRADHQVKIRGFRIELGEVEARLLDLEGIREAAALALDGQLVAYLVAEGGEDETRQPALRERIRTA
LRASLPDYMVPSHLLFLERMPLSPNGKLDRRALPKPD
> SEQ ID NO: 85 Partial A-domain Ser 5
LVEALQPERNASHNPLFQVLFNHQSEIRSVTPEVQLEDLRLEGLAWDGQTAQFDLTLDIQEDENGIWASFDYATD
LFDASTVERLAGHWRNLLRGIVANPRQRLGELPLLDAPERRQTLSEWNPAQRECAVQGTLQQRFEEQARQRPQAV
ALILDEQRLSYGELNARANRLAHCLIARGVGADVPVGLALERSLDMLVGLLAILKAGGAYLPLDPAAPEERLAHI
LDDSGVRLLLTQGHLLERLPRQAGVEVLAIDGLVLDGYAESDPLPTLSADNLAYVIYTSGSTGQPKGAGNRHSAL
TNRLQWMQEAYGLGASDTVLQKTPFSFDVSVWEFFWPLMSGARLVVAAPGDHRDPARLISVITAEQVTTVHFVPS
MLQAFLQDAAVTRCQSLQRIVCSGEALPVDAQQQVFAKLPQAGLYNLYGPTEAAIDVTHWTCVDEGHDTVPIGEP
IANLRTHVLDADLSPVPVGVAGELYLGGAGLARSYHRRPGLTAERFVPCPFHPGARLYRSGDRVRQRADGVIEYL
GRLDHQVKLRGLRIELGEIEARLLEHPAVREASVQVVDGKQLVAYVVLQPNGDDWRERLSTHLASHLPDYMVPAQ
WVVLEHMPLSPNGKLDRKALPKPE
> SEQ ID NO: 87 Partial A-domain Lys 5
LVEALQPERNASHNPLFQVLFNHQSEIRSVTPEVQLEDLRLEGLAWDGQTAQFDLTLDIQEDENGIWASFDYATD
LFDASTVERLAGHWRNLLRGIVANPRQRLGELPLLDAPERRQTLSEWNPAQRECAVQGTLQQRFEEQARQRPQAV
ALILDEQRLSYGELNARANRLAHCLIARGVGADVPVGLALERSLDMLVGLLAILKAGGAYLPLDPAAPEERLAHI
LDDSGVRLLLTQGHLLERLPRQAGVEVLAIDGLVLDGYAESDPLPTLSADNLAYVIYTSGSTGKPKGVAISHAAL
AQFSRIASGYSALTPEDRILQFATLSFDGFVEQLYPALTRGACVVLRGGDLWDTGELYRQIVEQGVTLADLPTAY
WNLFLLDALAEPRRSYGALRQIHIGGEAMPLEGPKLWRQAGMGRVRLLNTYGPTEATVVSSVFDCSAENARVGNA
SPIGQALPGRTLLVLDEHLGLLPVGPVGELYIASRAGLARAYHDRPGLTAERFLPDPFGEPGSRLYRTGDLARRR
GDGVIEYMGRADHQVKIRGFRIELGEVEARLLDLEGIREAAALALDGQLVAYLVAEGGEDETRQPALRERIRTAL
RASLPDYMVPSHLLFLERMPLSPNGKLDRRALPKPD
> SEQ ID NO: 89 Partial A-domain Ser 6
LVEALQPERNASHNPLFQVLFNHQSEIRSVTPEVQLEDLRLEGLAWDGQTAQFDLTLDIQEDENGIWASFDYATD
LFDASTVERLAGHWRNLLRGIVANPRQRLGELPLLDAPERRQTLSEWNPAQRECAVQGTLQQRFEEQARQRPQAV
ALILDEQRLSYGELNARANRLAHCLIARGVGADVPVGLALERSLDMLVGLLAILKAGGAYLPLDPAAPEERLAHI
LDDSGVRLLLTQGHLLERLPRQAGVEVLAIDGLVLDGYAESDPLPTLSADNLAYVIYTSGSTGKPKGTLLTHRNA
LRLFSATEAWFGFDERDVWTLFHSYAFDVSVWEFFWPLMSGARLVVAAPGDHRDPARLISVITAEQVTTVHFVPS
MLQAFLQDAAVTRCQSLQRIVCSGEALPVDAQQQVFAKLPQAGLYNLYGPTEAAIDVTHWTCVDEGHDTVPIGEP
IANLRTHVLDADLSPVPVGVAGELYLGGAGLARSYHRRPGLTAERFVPCPFHPGARLYRSGDRVRQRADGVIEYL
GRLDHQVKLRGLRIELGEIEARLLEHPAVREASVQVVDGKQLVAYVVLQPNGDDWRERLSTHLASHLPDYMVPAQ
WVVLEHMPLSPNGKLDRKALPKPE
> SEQ ID NO: 91 Partial A-domain Lys 6
LVEALQPERNASHNPLFQVLENHQSEIRSVTPEVQLEDLRLEGLAWDGQTAQFDLTLDIQEDENGIWASFDYATD
LFDASTVERLAGHWRNLLRGIVANPRQRLGELPLLDAPERRQTLSEWNPAQRECAVQGTLQQRFEEQARQRPQAV
ALILDEQRLSYGELNARANRLAHCLIARGVGADVPVGLALERSLDMLVGLLAILKAGGAYLPLDPAAPEERLAHI
LDDSGVRLLLTQGHLLERLPRQAGVEVLAIDGLVLDGYAESDPLPTLSADNLAYVIYTSGSTGKPKGTLLTHRNA
LRLFSATEAWFGFDERDVWTLFHSYAFDGFVEQLYPALTRGACVVLRGGDLWDTGELYRQIVEQGVTLADLPTAY
WNLFLLDALAEPRRSYGALRQIHIGGEAMPLEGPKLWRQAGMGRVRLLNTYGPTEATVVSSVFDCSAENARVGNA
SPIGQALPGRTLLVLDEHLGLLPVGPVGELYIASRAGLARAYHDRPGLTAERFLPDPFGEPGSRLYRTGDLARRR
GDGVIEYMGRADHQVKIRGFRIELGEVEARLLDLEGIREAAALALDGQLVAYLVAEGGEDETRQPALRERIRTAL
RASLPDYMVPSHLLFLERMPLSPNGKLDRRALPKPD
> SEQ ID NO: 93 Ser_A
LVEALQPERNASHNPLFQVLFNHQSEIRSVTPEVQLEDLRLEGLAWDGQTAQFDLTLDIQEDENGIWASFDYATD
LFDASTVERLAGHWLALLQAICANAGQRIAEVPMLDAAEQQQIVRDWNATAADFPGEHCLHSLIEAQVQATPDAP
ALIFAAEQLSYAQLNARANQLAHRLREAGVGPDVLVGICVERSVDMVIGLLAIIKAGGAYVPLDPDYPEDRLAYM
MQDSGIGLLLTQSALLQGLPVQVQSLCLDQEGDWLDGYSTANPINLSHPQNLAYVIYTSGSTGKPKGAGNSHRAL
VNRLHWMQKAYALDGSDTVLQKTPFSFDVSVWEFFWPLLTGARLAVALPGDHRDPERLVQTIREHQVTTLHFVPS
MLQAFLTHPQVEGCNSLRRVVCSGEALPSELAGQVLKRLPQTGLFNLYGPTEAAIDVTHWTCTKDDVLSVPIGRP
IDNLKTHILDDGLLPAAQGVSAELYLGGIGLARGYHNRAALTAERFVPDPFDEQGGRLYRTGDLARYRDEGVIEY
AGRIDHQVKIRGLRIELGEIEASLLEHGSVQEAVVIDVDGPSGKQLAAYLVAEHSGDNLRDALKVYLKETLPDYM
VPTHFVWLASMPLSANGKLDRKALPTPD
> SEQ ID NO: 95 Ser_B
LVEALQPERNASHNPLFQVLFNHQSEIRSVTPEVQLEDLRLEGLAWDGQTAQFDLTLDIQEDENGIWASFDYATD
LFDASTVERLAGHWRNLLRGIVANPRQRLGELPLLDAAEQQQIVRDWNATAADFPGEHCLHSLIEAQVQATPDAP
ALIFAAEQLSYAQLNARANQLAHRLREAGVGPDVLVGICVERSVDMVIGLLAIIKAGGAYVPLDPDYPEDRLAYM
MQDSGIGLLLTQSALLQGLPVQVQSLCLDQEGDWLDGYSTANPINLSHPQNLAYVIYTSGSTGKPKGAGNSHRAL
VNRLHWMQKAYALDGSDTVLQKTPFSFDVSVWEFFWPLLTGARLAVALPGDHRDPERLVQTIREHQVTTLHFVPS
MLQAFLTHPQVEGCNSLRRVVCSGEALPSELAGQVLKRLPQTGLFNLYGPTEAAIDVTHWTCTKDDVLSVPIGRP
IDNLKTHILDDGLLPAAQGVSAELYLGGIGLARGYHNRAALTAERFVPDPFDEQGGRLYRTGDLARYRDEGVIEY
AGRIDHQVKIRGLRIELGEIEASLLEHGSVQEAVVIDVDGPSGKQLAAYLVAEHSGDNLRDALKVYLKETLPDYM
VPTHFVWLASMPLSANGKLDRKALPTPD
> SEQ ID NO: 97 Ser C
LVEALQPERNASHNPLFQVLFNHQSEIRSVTPEVQLEDLRLEGLAWDGQTAQFDLTLDIQEDENGIWASFDYATD
LFDASTVERLAGHWRNLLRGIVANPRQRLGELPLLDAPEQQQIVRDWNATAADFPGEHCLHSLIEAQVQATPDAP
ALIFAAEQLSYAQLNARANQLAHRLREAGVGPDVLVGICVERSVDMVIGLLAIIKAGGAYVPLDPDYPEDRLAYM
MQDSGIGLLLTQSALLQGLPVQVQSLCLDQEGDWLDGYSTANPINLSHPQNLAYVIYTSGSTGKPKGAGNSHRAL
VNRLHWMQKAYALDGSDTVLQKTPFSFDVSVWEFFWPLLTGARLAVALPGDHRDPERLVQTIREHQVTTLHFVPS
MLQAFLTHPQVEGCNSLRRVVCSGEALPSELAGQVLKRLPQTGLFNLYGPTEAAIDVTHWTCTKDDVLSVPIGRP
IDNLKTHILDDGLLPAAQGVSAELYLGGIGLARGYHNRAALTAERFVPDPFDEQGGRLYRTGDLARYRDEGVIEY
AGRIDHQVKIRGLRIELGEIEASLLEHGSVQEAVVIDVDGPSGKQLAAYLVAEHSGDNLRDALKVYLKETLPDYM
VPTHFVWLASMPLSANGKLDRKALPTPD
> SEQ ID NO: 99 Ser_D
LVEALQPERNASHNPLFQVLFNHQSEIRSVTPEVQLEDLRLEGLAWDGQTAQFDLTLDIQEDENGIWASFDYATD
LFDASTVERLAGHWRNLLRGIVANPRQRLGELPLLDAPERRQTLSEWNATAADFPGEHCLHSLIEAQVQATPDAP
ALIFAAEQLSYAQLNARANQLAHRLREAGVGPDVLVGICVERSVDMVIGLLAIIKAGGAYVPLDPDYPEDRLAYM
MQDSGIGLLLTQSALLQGLPVQVQSLCLDQEGDWLDGYSTANPINLSHPQNLAYVIYTSGSTGKPKGAGNSHRAL
VNRLHWMQKAYALDGSDTVLQKTPFSFDVSVWEFFWPLLTGARLAVALPGDHRDPERLVQTIREHQVTTLHFVPS
MLQAFLTHPQVEGCNSLRRVVCSGEALPSELAGQVLKRLPQTGLFNLYGPTEAAIDVTHWTCTKDDVLSVPIGRP
IDNLKTHILDDGLLPAAQGVSAELYLGGIGLARGYHNRAALTAERFVPDPFDEQGGRLYRTGDLARYRDEGVIEY
AGRIDHQVKIRGLRIELGEIEASLLEHGSVQEAVVIDVDGPSGKQLAAYLVAEHSGDNLRDALKVYLKETLPDYM
VPTHFVWLASMPLSANGKLDRKALPTPD
> SEQ ID NO: 101 fhOrn_A
LVEALQPERNASHNPLFQVLFNHQSEIRSVTPEVQLEDLRLEGLAWDGQTAQFDLTLDIQEDENGIWASFDYATD
LFDASTVERLAGHWQNLLQGMVADPRQNLSQLNLLDNAERQQILQLWNQSDAGFSAKRLVHELVADRAGETPEAV
AVKFGEQQLTYGELDRQANRLAHALIARGVGPEVRVAIAMPRSAEIMVAFLAVMKAGGVYVPLDIEYPRDRLLYM
MQDSRARLLLTHSAVQQRLPIPDGLEALAVDQAQAWSADDDTAPEVALDGDNLAYVIYTSGSTGMPKGVAVSHGP
LVAHIIATGERYETSPADCELHFMSFAFDGSHEGWMHPLINGASVLIRDDSLWLPEYTYQQMHRHHVTMAVFPPV
YLQQLAEHAERDGNPPKVRVYCFGGDAVAQASYDLAWRALKPTYLFNGYGPTETVVTPLLWKARRGDPCGAVYAP
IGTLLGNRSGYVLDAQLNLQPIGVAGELYLGGEGVARGYLERPALTAEREVPDPFGKPGSRVYRSGDLTRGRPDG
VVDYLGRVDHQVKIRGFRIELGEIEARLREQDSVGETVVVAQEGPSGKQLVAYVVPLDPLLVDDAVAQSTCREAL
RRALKTRLPDYMVPTHLMFLERMPLTPNGKLDRKGLPRPD
> SEQ ID NO: 103 fhOrn_B
LVEALQPERNASHNPLFQVLFNHQSEIRSVTPEVQLEDLRLEGLAWDGQTAQFDLTLDIQEDENGIWASFDYATD
LEDASTVERLAGHWRNLLRGIVANPRQRLGELPLLDNAERQQILQLWNQSDAGFSAKRLVHELVADRAGETPEAV
AVKFGEQQLTYGELDRQANRLAHALIARGVGPEVRVAIAMPRSAEIMVAFLAVMKAGGVYVPLDIEYPRDRLLYM
MQDSRARLLLTHSAVQQRLPIPDGLEALAVDQAQAWSADDDTAPEVALDGDNLAYVIYTSGSTGMPKGVAVSHGP
LVAHIIATGERYETSPADCELHFMSFAFDGSHEGWMHPLINGASVLIRDDSLWLPEYTYQQMHRHHVTMAVFPPV
YLQQLAEHAERDGNPPKVRVYCFGGDAVAQASYDLAWRALKPTYLFNGYGPTETVVTPLLWKARRGDPCGAVYAP
IGTLLGNRSGYVLDAQLNLQPIGVAGELYLGGEGVARGYLERPALTAERFVPDPFGKPGSRVYRSGDLTRGRPDG
VVDYLGRVDHQVKIRGFRIELGEIEARLREQDSVGETVVVAQEGPSGKQLVAYVVPLDPLLVDDAVAQSTCREAL
RRALKTRLPDYMVPTHLMFLERMPLTPNGKLDRKGLPRPD
> SEQ ID NO: 105 fhOrn_C
LVEALQPERNASHNPLFQVLFNHQSEIRSVTPEVQLEDLRLEGLAWDGQTAQFDLTLDIQEDENGIWASFDYATD
LFDASTVERLAGHWRNLLRGIVANPRQRLGELPLLDAPERQQILQLWNQSDAGFSAKRLVHELVADRAGETPEAV
AVKFGEQQLTYGELDRQANRLAHALIARGVGPEVRVAIAMPRSAEIMVAFLAVMKAGGVYVPLDIEYPRDRLLYM
MQDSRARLLLTHSAVQQRLPIPDGLEALAVDQAQAWSADDDTAPEVALDGDNLAYVIYTSGSTGMPKGVAVSHGP
LVAHIIATGERYETSPADCELHFMSFAFDGSHEGWMHPLINGASVLIRDDSLWLPEYTYQQMHRHHVTMAVFPPV
YLQQLAEHAERDGNPPKVRVYCFGGDAVAQASYDLAWRALKPTYLFNGYGPTETVVTPLLWKARRGDPCGAVYAP
IGTLLGNRSGYVLDAQLNLQPIGVAGELYLGGEGVARGYLERPALTAERFVPDPFGKPGSRVYRSGDLTRGRPDG
VVDYLGRVDHQVKIRGFRIELGEIEARLREQDSVGETVVVAQEGPSGKQLVAYVVPLDPLLVDDAVAQSTCREAL
RRALKTRLPDYMVPTHLMFLERMPLTPNGKLDRKGLPRPD
> SEQ ID NO: 107 fhOrn_D
LVEALQPERNASHNPLFQVLFNHQSEIRSVTPEVQLEDLRLEGLAWDGQTAQFDLTLDIQEDENGIWASFDYATD
LFDASTVERLAGHWRNLLRGIVANPRQRLGELPLLDAPERRQTLSEWNQSDAGFSAKRLVHELVADRAGETPEAV
AVKFGEQQLTYGELDRQANRLAHALIARGVGPEVRVAIAMPRSAEIMVAFLAVMKAGGVYVPLDIEYPRDRLLYM
MQDSRARLLLTHSAVQQRLPIPDGLEALAVDQAQAWSADDDTAPEVALDGDNLAYVIYTSGSTGMPKGVAVSHGP
LVAHIIATGERYETSPADCELHFMSFAFDGSHEGWMHPLINGASVLIRDDSLWLPEYTYQQMHRHHVTMAVFPPV
YLQQLAEHAERDGNPPKVRVYCFGGDAVAQASYDLAWRALKPTYLFNGYGPTETVVTPLLWKARRGDPCGAVYAP
IGTLLGNRSGYVLDAQLNLQPIGVAGELYLGGEGVARGYLERPALTAERFVPDPFGKPGSRVYRSGDLTRGRPDG
VVDYLGRVDHQVKIRGFRIELGEIEARLREQDSVGETVVVAQEGPSGKQLVAYVVPLDPLLVDDAVAQSTCREAL
RRALKTRLPDYMVPTHLMFLERMPLTPNGKLDRKGLPRPD
> SEQ ID NO: 110 1_TycB1_Pro
LAGHLQQIADCVANNSGVELCQIPLLTEAETSQLLAKRTETAADYPAATMHELFSRQAEKTPEQVAVVFADQHLT
YRELDEKSNQLARFLRKKGIGTGSLVGTLLDRSLDMIVGILGVLKAGGAFVPIDPELPAERIAYMLTHSRVPLVV
TQNHLRAKVTTPTETIDINTAVIGEESRAPIESLNQPHDLFYIIYTSGTTGQPKGVMLEHRNMANLMHFTFDQTN
IAFHEKVLQYTTCSFDVCYQEIFSTLLSGGQLYLITNELRRHVEKLFAFIQEKQISILSLPVSFLKFIFNEQDYA
QSFPRCVKHIITAGEQLVVTHELQKYLRQHRVFLHNHYGPSETHVVTTCTMDPGQAIPELPPIGKPISNTGIYIL
DEGLQLKPEGIVGELYISGANVGRGYLHQPELTAEKFLDNPYQPGERMYRTGDLALWLPDGQLEFLGRIDHQVKI
RGHRIELGEIESRLLNHPAIKEAVVIDRADETGGKFLCAYVVLQKALSDEEMRAYLAQALPEYMIPSFFVTLERI
PVTPNGKTDRRALPKPE
> SEQ ID NO: 112 2_TycC6_Leu
LAGHLQQIADCVANNPHIRLGEIDMLLPEEKQQILAGFNDTAVSYALDKTLHQLFEEQVDKTPDQAALLFSEQSL
TYSELNERANRLARVLRAKGVGPDRLVAIMAERSPEMVIGILGILKAGGAYVPVDPGYPQERIQYLLEDSNAALL
LSQAHLLPLLAQVSSELPECLDLNAELDAGLSGSNLPAVNQPTDLAYVIYTSGTTGKPKGVMIPHQGIVNCLQWR
RDEYGFGPSDKALQVFSFAFDGFVASLFAPLLGGATCVLPQEAAAKDPVALKKLMAATEVTHYYGVPSLFQAILD
CSTTTDFNQLRCVTLGGEKLPVQLVQKTKEKHPAIEINNEYGPTENSVVTTISRSIEAGQAITIGRPLANVQVYI
VDEQHHLQPIGVVGELCIGGAGLARGYLNKPELTAEKFVANPFRPGERMYKTGDLVKWRTDGTIEYIGRADEQVK
VRGYRIEIGEIESAVLAYQGIDQAVVVARDDDATAGSYLCAYFVAATAVSVSGLRSHLAKELPAYMIPSYFVELD
QLPLSANGKVDRKALPKPQ
> SEQ ID NO: 114 3_SrfAC_Leu
LAGHLQQIADCVANNPDQPVSTINLVDDREREFLLTGLNPPAQAHETKPLTYWFKEAVNANPDAPALTYSGQTLS
YRELDEEANRIARRLQKHGAGKGSVVALYTKRSLELVIGILGVLKAGAAYLPVDPKLPEDRISYMLADSAAACLL
THQEMKEQAAELPYTGTTLFIDDQTRFEEQASDPATAIDPNDPAYIMYTSGTTGKPKGNITTHANIQGLVKHVDY
MAFSDQDTFLSVSNYAFDAFTFDFYASMLNAARLIIADEHTLLDTERLTDLILQENVNVMFATTALFNLLTDAGE
DWMKGLRCILFGGERASVPHVRKALRIMGPGKLINCYGPTEGTVFATAHVVHDLPDSISSLPIGKPISNASVYIL
NEQSQLQPFGAVGELCISGMGVSKGYVNRADLTKEKFIENPFKPGETLYRTGDLARWLPDGTIEYAGRIDDQVKI
RGHRIELEEIEKQLQEYPGVKDAVVVADRHESGDASINAYLVNRTQLSAEDVKAHLKKQLPAYMVPQTFTFLDEL
PLTTNGKVNKRLLPKPD
> SEQ ID NO: 116 4_NZ_CP021920.1.cluster002_Phe
LAGHLQQIADCVANHPDIQLSQIEIMSEDERNMLFYQFNDTKTDYPKDKTICQLFAERAARIPDHTALVFEDQKL
TYRELDERSNQLAGFLREKGVEPNTAVGIMVERSPEMIIGILGILKAGAAYLPLDPAYPEDRIKYILEDSQTKIL
LTQDALMKERTLIKDAAIMKIDIRDNQIVRRNADRLPHFPHAGDLAYIIYTSGSTGKPKGVLIEQKGLCNLVHAV
IDLMQLKTDSRVIQFASLSFDASAFEIFSALAAGAALVLGRQEDMMPGQALTSFLRHHEITHATLPPTVLNVLDE
SQLDHLKVIVSAGSACSEELATRWSGKRMFINAYGPTETTVCATAGVYRGTGRPHIGSPIANTNIYIMDQNVQPV
ATGIVGEVCVGGISLARGYLNKPELTAEKFIPHPFVPGERLYRTGDLARWLPDGNLEFLGRIDHQVKIRGYRIEL
GEIENQLLKHDNIEEAAVIARTGKDNNDYLCAYIVSQKQLTATEVSEWLEKELPHYMIPAYVVKLDKLPLTSNDK
VDRKALPEPD
> SEQ ID NO: 118 5_NZ_CP020028.1.cluster004_Leu
LAGHLQQIADCVANCPKMRIEDIEIVPEEEGSLLLHDFNRTEAEYPKDQTINALFEERAEQRADHPALVWGEQTL
TYRELNEQANRLAKVLRARGVKADDIVAIMTERSMEMVIGILGTLKAGGAYLPIDPNYPEERIHYMLEDSGASML
LTQKHLRDKLTYHGPIMDVDGEDLKHLELDGHANLQPANKPEDLAYIIYTSGSTGKPKGVMVEHRGIINLWHFFQ
EQWGVNGSDRMLQFASSSFDASVWEMFTILLGGGTLYLVSRDIINNLNEFARFVNENQITIALLPPTYLAGIEPE
KLPALKKLVTGGSAITKELVTRWKDSVEYMNAYGPSESSVIATAWTYREEDMGYSSVPIGKPIANTRIYIMDEHQ
KLLPLGAAGEMCVAGDGLARGYLHRPELTAEKFVVNPYEAGEKLYRTGDLVRWLPDGNIEFLGRIDDQVKIRGFR
IELGEIEAQLQKHPLVQEVAVIAREDKQKEKYLAAYITAEGEPEAEELREQLLQELPDYMVPSSFMQLEHMPMTP
SGKIDRKALPEPE
> SEQ ID NO: 120 6_NZ_CM000756.1.cluster012_Leu
LAGHLQQIADCVANNLSISVNKIDMIPQEEKRFLLYEHNDTNVDFSKNQLIHKLFEEQVERTPDSIAVVFEDKQL
TYRELNEKSNQLARALRENGVGSDKIVGILLERSVDVIVGIMGILKAGGAYLPIDPTYPIDRIKYILQDSQTEIL
LTQDKLINLVDCTEVDDISIINIHNEHLFKYGTENLRIDSSSKDLVYVIYTSGSTGKPKGVMVEHHSLVNLCNWH
NSFNKISETDKNASYASISFDAFAWEVFPYIIAGSEIHIINDNLKLDITKLNKYFIEKEISISFLPTQVCEQFLM
LENTSLRRLLTGGDKLNYFENKSYQIVNNYGPTENSVVTTSFIIENSYDNIPIGKPICNTKVFILNESNGLCPLG
VPGELCISGEGLARGYLNRPELTAEKFIPNPFIPGERMYRTGDLVRMLPDGNIEFLGRIDHQVKIRGFRIELGEI
ESQLLKHKEVKEAVVIAREDNNNHQYLCAYFTSETSKGETRVQEIRKFLTKELPEYMIPAFFVQLDKLPLTTNGK
VDRKALPSPD
> SEQ ID NO: 142 -Gly CA
SRTTDAVSTIPLADRQQPLALSFAQGRMWFLDQLEPLSSLYNIPQGIRLFGAVEVENLRLALEQIVARHESLRTT
FKILDGHSVQVVAPPAGFALPVIEVGGSDGSEREAEALRVVEEESQRPFDLSKGPLLRALLLRLDRDEHVLLLTL
HHIISDGWSLGVLFAELGALYEAFCKGEEAHLPELPIQYGDYAAWQREWLSGEVLERQTAYWREQLGGMAPSLNL
PTDRPRPAVQTSRGARQSFLVPPSLTRSLVELSRREGVTLYMTLLAAFQVLLQRYTGQDDISVGSPIAGRTTAET
EGLIGLFINTLVMRTDLSGDPTFRELLERVRQVALGAYAHQDVPFEKLVEQLQPERDMSRTPLFQVMFILQNTPG
LAPSLEGLTVEPLPIENETARFDLTLAMAESADGLPGEFEYNADLFDAETIARLLGHFTILLEGIAAGADVSISA
LPLLTGAESRRMLVEWNDTREAYAADRRVHELFEAQAARTPDASAVESQGRALSYAELNRRANQLARHLRRMGVG
PEVLVGICVEKSVEMLVGLLGILKAGGAYVPLDPAFPAERLAFMAEDAELPVLLTESRLTAVVPPNPTRRTVLLD
SDWELIAGESGDDLSDTGGGENTAYVIYTSGSTGRPKGVQVSHRALVNFLHSMRGRPGIEAGDTLLAVTTLSFDI
AGLELYLPLLTGARVVVAGREELSDGALLSERISRSGATVMQATPATWRLLLGAGWRGKSDLRIFCGGEALAREL
ANQLLEKCAELWNLYGPTETTIWSAIHRVETTEGAVSVGRPIANTRVYVLDKNLRPVPAGVPGELLIGGDGLARG
YLNRPDLTAEKFVPDPFGDAPGARLYRTGDLARYSPGGELEILNRVDTQVKIRGFRIEPGEIEGVLEQHPAIRQA
VVVARDDGEGEKRLVGYVVARPESALNVNELRRYLLGTLPEYMVPSAFVMLDELPLTPNGKIDREALPQPDAA
> SEQ ID NO: 144 -GlyA
SRTTDAVSTIPLADRQQPLALSFAQERQWFLWQLEPESAAYHIPSALRLRGRLDVDALQRSFDSLVARHETLRTR
FRLEGGRSYQQVQPAVSVSIEREQFGEEGLIERIQAIVVQPFDLERGPLLRVNLLQLAEDDHVLVLVQHHIVSDG
WSMQVMVEELVQLYAAYSQGLDVVLPALPIQYADYALWQRSWMEAGEKERQLAYWTGLLGGEQPVLELPFDRPRP
ARQSHRGAQLGFELSRELVEAVRALAQREGASSFMLLLASFQALLYRYSGQADIRVGVPIANRNRVETERLIGFF
VNTQVLKADLDGRMGFDELLAQARQRALEAQAHQDLPFEQLVEALQPERNASHNPLFQVLFNHQSEIRSVTPEVQ
LEDLRLEGLAWDGQTAQFDLTLDIQEDENGIWASFDYATDLFDASTVERLAGHFTILLEGIAAGADVSISALPLL
TGAESRRMLVEWNDTREAYAADRRVHELFEAQAARTPDASAVESQGRALSYAELNRRANQLARHLRRMGVGPEVL
VGICVEKSVEMLVGLLGILKAGGAYVPLDPAFPAERLAFMAEDAELPVLLTESRLTAVVPPNPTRRTVLLDSDWE
LIAGESGDDLSDTGGGENTAYVIYTSGSTGRPKGVQVSHRALVNFLHSMRGRPGIEAGDTLLAVTTLSFDIAGLE
LYLPLLTGARVVVAGREELSDGALLSERISRSGATVMQATPATWRLLLGAGWRGKSDLRIFCGGEALARELANQL
LEKCAELWNLYGPTETTIWSAIHRVETTEGAVSVGRPIANTRVYVLDKNLRPVPAGVPGELLIGGDGLARGYLNR
PDLTAEKFVPDPFGDAPGARLYRTGDLARYSPGGELEILNRVDTQVKIRGFRIEPGEIEGVLEQHPAIRQAVVVA
RDDGEGEKRLVGYVVARPESALNVNELRRYLLGTLPEYMVPSAFVMLDELPLTPNGKIDREALPQPDAA
> SEQ ID NO: 146 -GlyX
SRTTDAVSTIPLADRQQPLALSFAQERQWFLWQLEPESAAYHIPSALRLRGRLDVDALQRSFDSLVARHETLRTR
FRLEGGRSYQQVQPAVSVSIEREQFGEEGLIERIQAIVVQPFDLERGPLLRVNLLQLAEDDHVLVLVQHHIVSDG
WSMQVMVEELVQLYAAYSQGLDVVLPALPIQYADYALWQRSWMEAGEKERQLAYWTGLLGGEQPVLELPFDRPRP
ARQSHRGAQLGFELSRELVEAVRALAQREGASSFMLLLASFQALLYRYSGQADIRVGVPIANRNRVETERLIGFF
VNTQVLKADLDGRMGFDELLAQARQRALEAQAHQDLPFEQLVEALQPERNASHNPLFQVLFNHQSEIRSVTPEVQ
LEDLRLEGLAWDGQTAQFDLTLDIQEDENGIWASFDYATDLFDASTVERLAGHWRNLLRGIVAGADVSISALPLL
TGAESRRMLVEWNDTREAYAADRRVHELFEAQAARTPDASAVESQGRALSYAELNRRANQLARHLRRMGVGPEVL
VGICVEKSVEMLVGLLGILKAGGAYVPLDPAFPAERLAFMAEDAELPVLLTESRLTAVVPPNPTRRTVLLDSDWE
LIAGESGDDLSDTGGGENTAYVIYTSGSTGRPKGVQVSHRALVNFLHSMRGRPGIEAGDTLLAVTTLSFDIAGLE
LYLPLLTGARVVVAGREELSDGALLSERISRSGATVMQATPATWRLLLGAGWRGKSDLRIFCGGEALARELANQL
LEKCAELWNLYGPTETTIWSAIHRVETTEGAVSVGRPIANTRVYVLDKNLRPVPAGVPGELLIGGDGLARGYLNR
PDLTAEKFVPDPFGDAPGARLYRTGDLARYSPGGELEILNRVDTQVKIRGFRIEPGEIEGVLEQHPAIRQAVVVA
RDDGEGEKRLVGYVVARPESALNVNELRRYLLGTLPEYMVPSAFVMLDELPLTPNGKIDREALPQPDAA
> SEQ ID NO: 148 -GlyB
SRTTDAVSTIPLADRQQPLALSFAQERQWFLWQLEPESAAYHIPSALRLRGRLDVDALQRSFDSLVARHETLRTR
FRLEGGRSYQQVQPAVSVSIEREQFGEEGLIERIQAIVVQPFDLERGPLLRVNLLQLAEDDHVLVLVQHHIVSDG
WSMQVMVEELVQLYAAYSQGLDVVLPALPIQYADYALWQRSWMEAGEKERQLAYWTGLLGGEQPVLELPFDRPRP
ARQSHRGAQLGFELSRELVEAVRALAQREGASSFMLLLASFQALLYRYSGQADIRVGVPIANRNRVETERLIGFF
VNTQVLKADLDGRMGFDELLAQARQRALEAQAHQDLPFEQLVEALQPERNASHNPLFQVLFNHQSEIRSVTPEVQ
LEDLRLEGLAWDGQTAQFDLTLDIQEDENGIWASFDYATDLFDASTVERLAGHWRNLLRGIVANPRQRLGELPLL
DGAESRRMLVEWNDTREAYAADRRVHELFEAQAARTPDASAVESQGRALSYAELNRRANQLARHLRRMGVGPEVL
VGICVEKSVEMLVGLLGILKAGGAYVPLDPAFPAERLAFMAEDAELPVLLTESRLTAVVPPNPTRRTVLLDSDWE
LIAGESGDDLSDTGGGENTAYVIYTSGSTGRPKGVQVSHRALVNFLHSMRGRPGIEAGDTLLAVTTLSFDIAGLE
LYLPLLTGARVVVAGREELSDGALLSERISRSGATVMQATPATWRLLLGAGWRGKSDLRIFCGGEALARELANQL
LEKCAELWNLYGPTETTIWSAIHRVETTEGAVSVGRPIANTRVYVLDKNLRPVPAGVPGELLIGGDGLARGYLNR
PDLTAEKFVPDPFGDAPGARLYRTGDLARYSPGGELEILNRVDTQVKIRGFRIEPGEIEGVLEQHPAIRQAVVVA
RDDGEGEKRLVGYVVARPESALNVNELRRYLLGTLPEYMVPSAFVMLDELPLTPNGKIDREALPQPDAA
> SEQ ID NO: 150 -GlyC
SRTTDAVSTIPLADRQQPLALSFAQERQWFLWQLEPESAAYHIPSALRLRGRLDVDALQRSFDSLVARHETLRTR
FRLEGGRSYQQVQPAVSVSIEREQFGEEGLIERIQAIVVQPFDLERGPLLRVNLLQLAEDDHVLVLVQHHIVSDG
WSMQVMVEELVQLYAAYSQGLDVVLPALPIQYADYALWQRSWMEAGEKERQLAYWTGLLGGEQPVLELPFDRPRP
ARQSHRGAQLGFELSRELVEAVRALAQREGASSFMLLLASFQALLYRYSGQADIRVGVPIANRNRVETERLIGFF
VNTQVLKADLDGRMGFDELLAQARQRALEAQAHQDLPFEQLVEALQPERNASHNPLFQVLFNHQSEIRSVTPEVQ
LEDLRLEGLAWDGQTAQFDLTLDIQEDENGIWASFDYATDLFDASTVERLAGHWRNLLRGIVANPRQRLGELPLL
DAPESRRMLVEWNDTREAYAADRRVHELFEAQAARTPDASAVESQGRALSYAELNRRANQLARHLRRMGVGPEVL
VGICVEKSVEMLVGLLGILKAGGAYVPLDPAFPAERLAFMAEDAELPVLLTESRLTAVVPPNPTRRTVLLDSDWE
LIAGESGDDLSDTGGGENTAYVIYTSGSTGRPKGVQVSHRALVNFLHSMRGRPGIEAGDTLLAVTTLSFDIAGLE
LYLPLLTGARVVVAGREELSDGALLSERISRSGATVMQATPATWRLLLGAGWRGKSDLRIFCGGEALARELANQL
LEKCAELWNLYGPTETTIWSAIHRVETTEGAVSVGRPIANTRVYVLDKNLRPVPAGVPGELLIGGDGLARGYLNR
PDLTAEKFVPDPFGDAPGARLYRTGDLARYSPGGELEILNRVDTQVKIRGFRIEPGEIEGVLEQHPAIRQAVVVA
RDDGEGEKRLVGYVVARPESALNVNELRRYLLGTLPEYMVPSAFVMLDELPLTPNGKIDREALPQPDAA
> SEQ ID NO: 152 -GlyD
SRTTDAVSTIPLADRQQPLALSFAQERQWFLWQLEPESAAYHIPSALRLRGRLDVDALQRSFDSLVARHETLRTR
FRLEGGRSYQQVQPAVSVSIEREQFGEEGLIERIQAIVVQPFDLERGPLLRVNLLQLAEDDHVLVLVQHHIVSDG
WSMQVMVEELVQLYAAYSQGLDVVLPALPIQYADYALWQRSWMEAGEKERQLAYWTGLLGGEQPVLELPFDRPRP
ARQSHRGAQLGFELSRELVEAVRALAQREGASSFMLLLASFQALLYRYSGQADIRVGVPIANRNRVETERLIGFF
VNTQVLKADLDGRMGFDELLAQARQRALEAQAHQDLPFEQLVEALQPERNASHNPLFQVLFNHQSEIRSVTPEVQ
LEDLRLEGLAWDGQTAQFDLTLDIQEDENGIWASFDYATDLFDASTVERLAGHWRNLLRGIVANPRQRLGELPLL
DAPERRQTLSEWNDTREAYAADRRVHELFEAQAARTPDASAVESQGRALSYAELNRRANQLARHLRRMGVGPEVL
VGICVEKSVEMLVGLLGILKAGGAYVPLDPAFPAERLAFMAEDAELPVLLTESRLTAVVPPNPTRRTVLLDSDWE
LIAGESGDDLSDTGGGENTAYVIYTSGSTGRPKGVQVSHRALVNFLHSMRGRPGIEAGDTLLAVTTLSFDIAGLE
LYLPLLTGARVVVAGREELSDGALLSERISRSGATVMQATPATWRLLLGAGWRGKSDLRIFCGGEALARELANQL
LEKCAELWNLYGPTETTIWSAIHRVETTEGAVSVGRPIANTRVYVLDKNLRPVPAGVPGELLIGGDGLARGYLNR
PDLTAEKFVPDPFGDAPGARLYRTGDLARYSPGGELEILNRVDTQVKIRGFRIEPGEIEGVLEQHPAIRQAVVVA
RDDGEGEKRLVGYVVARPESALNVNELRRYLLGTLPEYMVPSAFVMLDELPLTPNGKIDREALPQPDAA
> SEQ ID NO: 154 -PheCA
SRTTDAVSTIPLADRQQPLALSFAQGRLWFLDQLEPNSPFYNNPVAVRLKGQLDIARLEEALNALIQRHEALRTR
FVAVDGKPVAVVDAELRLKLSVEPAVDVEQQARAEALEPFDLATGPLIRARLLQVNAAEHIALVTLHHIISDGWS
TGVLVRELSALYAGRELAPLAIQYGDFAAWQREWLSGEVLEAQLNYWREQLQDAPPVLELATDRARPAVQSFRGS
HYRFQVPSEVAGELAELSRREGVTLFMVLLAAYQVLLSRYAGGQEDVVVGTPIANRQRTEVEGLIGFFVNTLVLR
TKLAGEPSVRELLGRVRETCLGAYAHQDLPFETLVETLQPERKLSHAPLFQTMLVWANAPAERLELGGLEVEAVE
AESGTARFDLTLEMGEGAGGELWGSLEYASDLWDESTVARMAGHFCELLGQMAGKVERPVTELELAVPEQAQWNA
TEAEYPRGVTIHALVEEQAARDPERAALRFEGQALSYGELVARVKETSREMGPRQLVAISLERGFAQVVAQLAAL
EAGGAYVPVDPSYPEERREYMLADSGAGVVVNGEGIVKREAGREVDGLAYMIYTSGSTGRPKGTMLRHEGLCNLA
RWQQRAFGITRESRVLQFAPSSFDASVWETFMALANGATLVLGRQEVLRQMEALHKLLVEEKITHVTLPPTVLEA
LEAEGLPDLQVVIAAGEACGRELVEKWGRGRRFFNAYGPTETTVCASAYECKVGERVAPAIGRPIANMQMWVLDE
WGRPAPVGVSGELHIGGVGLAAGYWERPELTAEKFVETAYGRVYKSGDVGRWRGDGVVEYVGRRDTQVKLRGYRI
ELGEVEEALRSCAGVRAAGVGVDGDRLVGYVVGGDIAEVRRELRGRLPEYMVPGVVMALEEMPLLPNGKIDRQAL
PQPDAA
> SEQ ID NO: 156 -PheA
SRTTDAVSTIPLADRQQPLALSFAQERQWFLWQLEPESAAYHIPSALRLRGRLDVDALQRSFDSLVARHETLRTR
FRLEGGRSYQQVQPAVSVSIEREQFGEEGLIERIQAIVVQPFDLERGPLLRVNLLQLAEDDHVLVLVQHHIVSDG
WSMQVMVEELVQLYAAYSQGLDVVLPALPIQYADYALWQRSWMEAGEKERQLAYWTGLLGGEQPVLELPFDRPRP
ARQSHRGAQLGFELSRELVEAVRALAQREGASSFMLLLASFQALLYRYSGQADIRVGVPIANRNRVETERLIGFF
VNTQVLKADLDGRMGFDELLAQARQRALEAQAHQDLPFEQLVEALQPERNASHNPLFQVLFNHQSEIRSVTPEVQ
LEDLRLEGLAWDGQTAQFDLTLDIQEDENGIWASFDYATDLFDASTVERLAGHFCELLGQMAGKVERPVTELELA
VPEQAQWNATEAEYPRGVTIHALVEEQAARDPERAALRFEGQALSYGELVARVKETSREMGPRQLVAISLERGFA
QVVAQLAALEAGGAYVPVDPSYPEERREYMLADSGAGVVVNGEGIVKREAGREVDGLAYMIYTSGSTGRPKGTML
RHEGLCNLARWQQRAFGITRESRVLQFAPSSFDASVWETFMALANGATLVLGRQEVLRQMEALHKLLVEEKITHV
TLPPTVLEALEAEGLPDLQVVIAAGEACGRELVEKWGRGRRFFNAYGPTETTVCASAYECKVGERVAPAIGRPIA
NMQMWVLDEWGRPAPVGVSGELHIGGVGLAAGYWERPELTAEKFVETAYGRVYKSGDVGRWRGDGVVEYVGRRDT
QVKLRGYRIELGEVEEALRSCAGVRAAGVGVDGDRLVGYVVGGDIAEVRRELRGRLPEYMVPGVVMALEEMPLLP
NGKIDRQALPQPDAA
> SEQ ID NO: 158 -PheX
SRTTDAVSTIPLADRQQPLALSFAQERQWFLWQLEPESAAYHIPSALRLRGRLDVDALQRSFDSLVARHETLRTR
FRLEGGRSYQQVQPAVSVSIEREQFGEEGLIERIQAIVVQPFDLERGPLLRVNLLQLAEDDHVLVLVQHHIVSDG
WSMQVMVEELVQLYAAYSQGLDVVLPALPIQYADYALWQRSWMEAGEKERQLAYWTGLLGGEQPVLELPFDRPRP
ARQSHRGAQLGFELSRELVEAVRALAQREGASSFMLLLASFQALLYRYSGQADIRVGVPIANRNRVETERLIGFF
VNTQVLKADLDGRMGFDELLAQARQRALEAQAHQDLPFEQLVEALQPERNASHNPLFQVLFNHQSEIRSVTPEVQ
LEDLRLEGLAWDGQTAQFDLTLDIQEDENGIWASFDYATDLFDASTVERLAGHWRNLLRGIVAKVERPVTELELA
VPEQAQWNATEAEYPRGVTIHALVEEQAARDPERAALRFEGQALSYGELVARVKETSREMGPRQLVAISLERGFA
QVVAQLAALEAGGAYVPVDPSYPEERREYMLADSGAGVVVNGEGIVKREAGREVDGLAYMIYTSGSTGRPKGTML
RHEGLCNLARWQQRAFGITRESRVLQFAPSSFDASVWETFMALANGATLVLGRQEVLRQMEALHKLLVEEKITHV
TLPPTVLEALEAEGLPDLQVVIAAGEACGRELVEKWGRGRRFFNAYGPTETTVCASAYECKVGERVAPAIGRPIA
NMQMWVLDEWGRPAPVGVSGELHIGGVGLAAGYWERPELTAEKFVETAYGRVYKSGDVGRWRGDGVVEYVGRRDT
QVKLRGYRIELGEVEEALRSCAGVRAAGVGVDGDRLVGYVVGGDIAEVRRELRGRLPEYMVPGVVMALEEMPLLP
NGKIDRQALPQPDAA
> SEQ ID NO: 160 -PheB
SRTTDAVSTIPLADRQQPLALSFAQERQWFLWQLEPESAAYHIPSALRLRGRLDVDALQRSFDSLVARHETLRTR
FRLEGGRSYQQVQPAVSVSIEREQFGEEGLIERIQAIVVQPFDLERGPLLRVNLLQLAEDDHVLVLVQHHIVSDG
WSMQVMVEELVQLYAAYSQGLDVVLPALPIQYADYALWQRSWMEAGEKERQLAYWTGLLGGEQPVLELPFDRPRP
ARQSHRGAQLGFELSRELVEAVRALAQREGASSFMLLLASFQALLYRYSGQADIRVGVPIANRNRVETERLIGFF
VNTQVLKADLDGRMGFDELLAQARQRALEAQAHQDLPFEQLVEALQPERNASHNPLFQVLFNHQSEIRSVTPEVQ
LEDLRLEGLAWDGQTAQFDLTLDIQEDENGIWASFDYATDLFDASTVERLAGHWRNLLRGIVANPRQRLGELPLL
DVPEQAQWNATEAEYPRGVTIHALVEEQAARDPERAALRFEGQALSYGELVARVKETSREMGPRQLVAISLERGF
AQVVAQLAALEAGGAYVPVDPSYPEERREYMLADSGAGVVVNGEGIVKREAGREVDGLAYMIYTSGSTGRPKGTM
LRHEGLCNLARWQQRAFGITRESRVLQFAPSSFDASVWETFMALANGATLVLGRQEVLRQMEALHKLLVEEKITH
VTLPPTVLEALEAEGLPDLQVVIAAGEACGRELVEKWGRGRRFFNAYGPTETTVCASAYECKVGERVAPAIGRPI
ANMOMWVLDEWGRPAPVGVSGELHIGGVGLAAGYWERPELTAEKFVETAYGRVYKSGDVGRWRGDGVVEYVGRRD
TQVKLRGYRIELGEVEEALRSCAGVRAAGVGVDGDRLVGYVVGGDIAEVRRELRGRLPEYMVPGVVMALEEMPLL
PNGKIDRQALPQPDAA
> SEQ ID NO: 162 -PheC
SRTTDAVSTIPLADRQQPLALSFAQERQWFLWQLEPESAAYHIPSALRLRGRLDVDALQRSFDSLVARHETLRTR
FRLEGGRSYQQVQPAVSVSIEREQFGEEGLIERIQAIVVQPFDLERGPLLRVNLLQLAEDDHVLVLVQHHIVSDG
WSMQVMVEELVQLYAAYSQGLDVVLPALPIQYADYALWQRSWMEAGEKERQLAYWTGLLGGEQPVLELPFDRPRP
ARQSHRGAQLGFELSRELVEAVRALAQREGASSFMLLLASFQALLYRYSGQADIRVGVPIANRNRVETERLIGFF
VNTQVLKADLDGRMGFDELLAQARQRALEAQAHQDLPFEQLVEALQPERNASHNPLFQVLFNHQSEIRSVTPEVQ
LEDLRLEGLAWDGQTAQFDLTLDIQEDENGIWASFDYATDLFDASTVERLAGHWRNLLRGIVANPRQRLGELPLL
DAPEQAQWNATEAEYPRGVTIHALVEEQAARDPERAALRFEGQALSYGELVARVKETSREMGPRQLVAISLERGF
AQVVAQLAALEAGGAYVPVDPSYPEERREYMLADSGAGVVVNGEGIVKREAGREVDGLAYMIYTSGSTGRPKGTM
LRHEGLCNLARWQQRAFGITRESRVLQFAPSSFDASVWETFMALANGATLVLGRQEVLRQMEALHKLLVEEKITH
VTLPPTVLEALEAEGLPDLQVVIAAGEACGRELVEKWGRGRRFFNAYGPTETTVCASAYECKVGERVAPAIGRPI
ANMQMWVLDEWGRPAPVGVSGELHIGGVGLAAGYWERPELTAEKFVETAYGRVYKSGDVGRWRGDGVVEYVGRRD
TQVKLRGYRIELGEVEEALRSCAGVRAAGVGVDGDRLVGYVVGGDIAEVRRELRGRLPEYMVPGVVMALEEMPLL
PNGKIDRQALPQPDAA
> SEQ ID NO: 164 -PheD
SRTTDAVSTIPLADRQQPLALSFAQERQWFLWQLEPESAAYHIPSALRLRGRLDVDALQRSFDSLVARHETLRTR
FRLEGGRSYQQVQPAVSVSIEREQFGEEGLIERIQAIVVQPFDLERGPLLRVNLLQLAEDDHVLVLVQHHIVSDG
WSMQVMVEELVQLYAAYSQGLDVVLPALPIQYADYALWQRSWMEAGEKERQLAYWTGLLGGEQPVLELPFDRPRP
ARQSHRGAQLGFELSRELVEAVRALAQREGASSFMLLLASFQALLYRYSGQADIRVGVPIANRNRVETERLIGFF
VNTQVLKADLDGRMGFDELLAQARQRALEAQAHQDLPFEQLVEALQPERNASHNPLFQVLFNHQSEIRSVTPEVQ
LEDLRLEGLAWDGQTAQFDLTLDIQEDENGIWASFDYATDLFDASTVERLAGHWRNLLRGIVANPRQRLGELPLL
DAPERRQTLSEWNATEAEYPRGVTIHALVEEQAARDPERAALRFEGQALSYGELVARVKETSREMGPRQLVAISL
ERGFAQVVAQLAALEAGGAYVPVDPSYPEERREYMLADSGAGVVVNGEGIVKREAGREVDGLAYMIYTSGSTGRP
KGTMLRHEGLCNLARWQQRAFGITRESRVLQFAPSSFDASVWETFMALANGATLVLGRQEVLRQMEALHKLLVEE
KITHVTLPPTVLEALEAEGLPDLQVVIAAGEACGRELVEKWGRGRRFFNAYGPTETTVCASAYECKVGERVAPAI
GRPIANMQMWVLDEWGRPAPVGVSGELHIGGVGLAAGYWERPELTAEKFVETAYGRVYKSGDVGRWRGDGVVEYV
GRRDTQVKLRGYRIELGEVEEALRSCAGVRAAGVGVDGDRLVGYVVGGDIAEVRRELRGRLPEYMVPGVVMALEE
MPLLPNGKIDRQALPQPDAA
> SEQ ID NO: 166 -AlaX
SRTTDAVSTIPLADRQQPLALSFAQERQWFLWQLEPESAAYHIPSALRLRGRLDVDALQRSFDSLVARHETLRTR
FRLEGGRSYQQVQPAVSVSIEREQFGEEGLIERIQAIVVQPFDLERGPLLRVNLLQLAEDDHVLVLVQHHIVSDG
WSMQVMVEELVQLYAAYSQGLDVVLPALPIQYADYALWQRSWMEAGEKERQLAYWTGLLGGEQPVLELPFDRPRP
ARQSHRGAQLGFELSRELVEAVRALAQREGASSFMLLLASFQALLYRYSGQADIRVGVPIANRNRVETERLIGFF
VNTQVLKADLDGRMGFDELLAQARQRALEAQAHQDLPFEQLVEALQPERNASHNPLFQVLFNHQSEIRSVTPEVQ
LEDLRLEGLAWDGQTAQFDLTLDIQEDENGIWASFDYATDLFDASTVERLAGHWRNLLRGIVAEPETAVSRLRLL
TLSEEHQVLNEWNNTAREFDITGGIHRLFEAQVERTPTATALVVGHEWISYHELNGRANSLAHHLVQSGVKAEDR
VGILMERSPAMVVSLLAVLKAGGCYVPLDPQYPRERLEFMQADAAVSALLTTRAVATTCGLQTDHVIYVDEVEQT
ATENLNVEISSQQLAYLIYTSGSTGVPKGVAITHGNATTFIHWASEIFDEKALNGVLFSTSICFDLSIFELFVTL
SNGGKVILADNALQLPTLPAANEVTLINTVPSAMTELIRSGAVPKSVRMVNLAGEALSKDLVTEIYTTTNVETVY
NLYGPSEDTTYSTFTATSPGEPVTIGKPIANTRAYVLDEQFQIAPVGVVGELYLGGAGLARGYWQRSDLTATKFI
PDNFSPMPGGRLYRTGDLARYLDNGELEFLGRADHQVKVRGYRIELGEIESELRQHAQVREAVVVARAERLVAYT
VSTSTVNSVELREHLRQRLPEYMVPSALVQLPSMPLTPNGKLDRKALPQPDAA
> SEQ ID NO: 168 -AlaB
SRTTDAVSTIPLADRQQPLALSFAQERQWFLWQLEPESAAYHIPSALRLRGRLDVDALQRSFDSLVARHETLRTR
FRLEGGRSYQQVQPAVSVSIEREQFGEEGLIERIQAIVVQPFDLERGPLLRVNLLQLAEDDHVLVLVQHHIVSDG
WSMQVMVEELVQLYAAYSQGLDVVLPALPIQYADYALWQRSWMEAGEKERQLAYWTGLLGGEQPVLELPFDRPRP
ARQSHRGAQLGFELSRELVEAVRALAQREGASSFMLLLASFQALLYRYSGQADIRVGVPIANRNRVETERLIGFF
VNTQVLKADLDGRMGFDELLAQARQRALEAQAHQDLPFEQLVEALQPERNASHNPLFQVLFNHQSEIRSVTPEVQ
LEDLRLEGLAWDGQTAQFDLTLDIQEDEYGIWASFDYATDLFDASTVERLAGHWRNLLRGIVANPRQRLGELPLL
DLSEEHQVLNEWNNTAREFDITGGIHRLFEAQVERTPTATALVVGHEWISYHELNGRANSLAHHLVQSGVKAEDR
VGILMERSPAMVVSLLAVLKAGGCYVPLDPQYPRERLEFMQADAAVSALLTTRAVATTCGLQTDHVIYVDEVEQT
ATENLNVEISSQQLAYLIYTSGSTGVPKGVAITHGNATTFIHWASEIFDEKALNGVLFSTSICFDLSIFELFVTL
SNGGKVILADNALQLPTLPAANEVTLINTVPSAMTELIRSGAVPKSVRMVNLAGEALSKDLVTEIYTTTNVETVY
NLYGPSEDTTYSTFTATSPGEPVTIGKPIANTRAYVLDEQFQIAPVGVVGELYLGGAGLARGYWQRSDLTATKFI
PDNFSPMPGGRLYRTGDLARYLDNGELEFLGRADHQVKVRGYRIELGEIESELRQHAQVREAVVVARAERLVAYT
VSTSTVNSVELREHLRQRLPEYMVPSALVQLPSMPLTPNGKLDRKALPQPDAA
> SEQ ID NO: 170 -AlaD
SRTTDAVSTIPLADRQQPLALSFAQERQWFLWQLEPESAAYHIPSALRLRGRLDVDALQRSFDSLVARHETLRTR
FRLEGGRSYQQVQPAVSVSIEREQFGEEGLIERIQAIVVQPFDLERGPLLRVNLLQLAEDDHVLVLVQHHIVSDG
WSMQVMVEELVQLYAAYSQGLDVVLPALPIQYADYALWQRSWMEAGEKERQLAYWTGLLGGEQPVLELPFDRPRP
ARQSHRGAQLGFELSRELVEAVRALAQREGASSFMLLLASFQALLYRYSGQADIRVGVPIANRNRVETERLIGFF
VNTQVLKADLDGRMGFDELLAQARQRALEAQAHQDLPFEQLVEALQPERNASHNPLFQVLFNHQSEIRSVTPEVQ
LEDLRLEGLAWDGQTAQFDLTLDIQEDENGIWASFDYATDLFDASTVERLAGHWRNLLRGIVANPRQRLGELPLL
DAPERRQTLSEWNNTAREFDITGGIHRLFEAQVERTPTATALVVGHEWISYHELNGRANSLAHHLVQSGVKAEDR
VGILMERSPAMVVSLLAVLKAGGCYVPLDPQYPRERLEFMQADAAVSALLTTRAVATTCGLQTDHVIYVDEVEQT
ATENLNVEISSQQLAYLIYTSGSTGVPKGVAITHGNATTFIHWASEIFDEKALNGVLFSTSICFDLSIFELFVTL
SNGGKVILADNALQLPTLPAANEVTLINTVPSAMTELIRSGAVPKSVRMVNLAGEALSKDLVTEIYTTTNVETVY
NLYGPSEDTTYSTFTATSPGEPVTIGKPIANTRAYVLDEQFQIAPVGVVGELYLGGAGLARGYWQRSDLTATKFI
PDNFSPMPGGRLYRTGDLARYLDNGELEFLGRADHQVKVRGYRIELGEIESELRQHAQVREAVVVARAERLVAYT
VSTSTVNSVELREHLRQRLPEYMVPSALVQLPSMPLTPNGKLDRKALPQPDAA
> SEQ ID NO: 172 -GluX
SRTTDAVSTIPLADRQQPLALSFAQERQWFLWQLEPESAAYHIPSALRLRGRLDVDALQRSFDSLVARHETLRTR
FRLEGGRSYQQVQPAVSVSIEREQFGEEGLIERIQAIVVQPFDLERGPLLRVNLLQLAEDDHVLVLVQHHIVSDG
WSMQVMVEELVQLYAAYSQGLDVVLPALPIQYADYALWQRSWMEAGEKERQLAYWTGLLGGEQPVLELPFDRPRP
ARQSHRGAQLGFELSRELVEAVRALAQREGASSFMLLLASFQALLYRYSGQADIRVGVPIANRNRVETERLIGFF
VNTQVLKADLDGRMGFDELLAQARQRALEAQAHQDLPFEQLVEALQPERNASHNPLFQVLFNHQSEIRSVTPEVQ
LEDLRLEGLAWDGQTAQFDLTLDIQEDENGIWASFDYATDLFDASTVERLAGHWRNLLRGIVADAGRKLSEVAVM
SAEEQQQLVEGLNQTSAEYPHHSCIHELFERQAAETPEAVAVVFGEEQVSYGELNERANRLAHYLREKGVKPESR
VGLLLERSVETIVGVLGILKAGGAYVPLDPEYPQERLAFMLTDSGIEVVITQAALGERLREQPQLRLLCLDTEGA
SISAYADTVLPSDATPDNLAYVIYTSGSTGNPKGVMIRHASALNLLTALRQSIYSQLTAPLRVSVNAPLSFDASV
KQLVQLLDGHTLVMVPEEARRDGAALVQYLARQRVEVLDCTPSQLRLMLGADVSTGPLGGLRAALVGGEELDERL
WRQLSEITDITGTAFFNVYGPTECTVDATVCRVSGQARRPSIGRPLANVSVYVLDRNLLPVPVGVAGQLHIGGEG
VARCYLNRPELTAEKFIPDGLGKVPGARLYRTGDLVRYLPDGQLEYLGRSDHQVKVRGYRIELGEIESALSLHPA
VREAAATVRADEAGDKRLVAYVVFDDGQTPSTGELRAYLQAHLPDYMIPHLFVTLEALPLTVNGKIDREALPQPD
AA
> SEQ ID NO: 174 -GluB
SRTTDAVSTIPLADRQQPLALSFAQERQWFLWQLEPESAAYHIPSALRLRGRLDVDALQRSFDSLVARHETLRTR
FRLEGGRSYQQVQPAVSVSIEREQFGEEGLIERIQAIVVQPFDLERGPLLRVNLLQLAEDDHVLVLVQHHIVSDG
WSMQVMVEELVQLYAAYSQGLDVVLPALPIQYADYALWQRSWMEAGEKERQLAYWTGLLGGEQPVLELPFDRPRP
ARQSHRGAQLGFELSRELVEAVRALAQREGASSFMLLLASFQALLYRYSGQADIRVGVPIANRNRVETERLIGFF
VNTQVLKADLDGRMGFDELLAQARQRALEAQAHQDLPFEQLVEALQPERNASHNPLFQVLFNHQSEIRSVTPEVQ
LEDLRLEGLAWDGQTAQFDLTLDIQEDENGIWASFDYATDLFDASTVERLAGHWRNLLRGIVANPRQRLGELPLL
DAEEQQQLVEGLNQTSAEYPHHSCIHELFERQAAETPEAVAVVFGEEQVSYGELNERANRLAHYLREKGVKPESR
VGLLLERSVETIVGVLGILKAGGAYVPLDPEYPQERLAFMLTDSGIEVVITQAALGERLREQPQLRLLCLDTEGA
SISAYADTVLPSDATPDNLAYVIYTSGSTGNPKGVMIRHASALNLLTALRQSIYSQLTAPLRVSVNAPLSFDASV
KQLVQLLDGHTLVMVPEEARRDGAALVQYLARQRVEVLDCTPSQLRLMLGADVSTGPLGGLRAALVGGEELDERL
WRQLSEITDITGTAFFNVYGPTECTVDATVCRVSGQARRPSIGRPLANVSVYVLDRNLLPVPVGVAGQLHIGGEG
VARCYLNRPELTAEKFIPDGLGKVPGARLYRTGDLVRYLPDGQLEYLGRSDHQVKVRGYRIELGEIESALSLHPA
VREAAATVRADEAGDKRLVAYVVFDDGQTPSTGELRAYLQAHLPDYMIPHLFVTLEALPLTVNGKIDREALPQPD
AA
> SEQ ID NO: 176 -GluD
SRTTDAVSTIPLADRQQPLALSFAQERQWFLWQLEPESAAYHIPSALRLRGRLDVDALQRSFDSLVARHETLRTR
FRLEGGRSYQQVQPAVSVSIEREQFGEEGLIERIQAIVVQPFDLERGPLLRVNLLQLAEDDHVLVLVQHHIVSDG
WSMQVMVEELVQLYAAYSQGLDVVLPALPIQYADYALWQRSWMEAGEKERQLAYWTGLLGGEQPVLELPFDRPRP
ARQSHRGAQLGFELSRELVEAVRALAQREGASSFMLLLASFQALLYRYSGQADIRVGVPIANRNRVETERLIGFF
VNTQVLKADLDGRMGFDELLAQARQRALEAQAHQDLPFEQLVEALQPERNASHNPLFQVLFNHQSEIRSVTPEVQ
LEDLRLEGLAWDGQTAQFDLTLDIQEDENGIWASFDYATDLFDASTVERLAGHWRNLLRGIVANPRQRLGELPLL
DAPERRQTLSELNQTSAEYPHHSCIHELFERQAAETPEAVAVVFGEEQVSYGELNERANRLAHYLREKGVKPESR
VGLLLERSVETIVGVLGILKAGGAYVPLDPEYPQERLAFMLTDSGIEVVITQAALGERLREQPQLRLLCLDTEGA
SISAYADTVLPSDATPDNLAYVIYTSGSTGNPKGVMIRHASALNLLTALRQSIYSQLTAPLRVSVNAPLSFDASV
KQLVQLLDGHTLVMVPEEARRDGAALVQYLARQRVEVLDCTPSQLRLMLGADVSTGPLGGLRAALVGGEELDERL
WRQLSEITDITGTAFFNVYGPTECTVDATVCRVSGQARRPSIGRPLANVSVYVLDRNLLPVPVGVAGQLHIGGEG
VARCYLNRPELTAEKFIPDGLGKVPGARLYRTGDLVRYLPDGQLEYLGRSDHQVKVRGYRIELGEIESALSLHPA
VREAAATVRADEAGDKRLVAYVVFDDGQTPSTGELRAYLQAHLPDYMIPHLFVTLEALPLTVNGKIDREALPQPD
AA
> SEQ ID NO: 178 -Arg1X
SRTTDAVSTIPLADRQQPLALSFAQERQWFLWQLEPESAAYHIPSALRLRGRLDVDALQRSFDSLVARHETLRTR
FRLEGGRSYQQVQPAVSVSIEREQFGEEGLIERIQAIVVQPFDLERGPLLRVNLLQLAEDDHVLVLVQHHIVSDG
WSMQVMVEELVQLYAAYSQGLDVVLPALPIQYADYALWQRSWMEAGEKERQLAYWTGLLGGEQPVLELPFDRPRP
ARQSHRGAQLGFELSRELVEAVRALAQREGASSFMLLLASFQALLYRYSGQADIRVGVPIANRNRVETERLIGFF
VNTQVLKADLDGRMGFDELLAQARQRALEAQAHQDLPFEQLVEALQPERNASHNPLFQVLFNHQSEIRSVTPEVQ
LEDLRLEGLAWDGQTAQFDLTLDIQEDENGIWASFDYATDLFDASTVERLAGHWRNLLRGIVADVHQPVARIDLL
ALPERNLLLQTWNDTRADYPYEQCVHQLFEEQVRKTPEAIAVVQDDIELSYAQLNVRANRLAHYLIKQGVRPDTR
VAICVERSFAMVIGLLAILKAGGTYLPLDPTHPSERLVELLDDAQPVVLLADATGRRALGTHVPNTTTTLSLDEP
LPADAQSEATTSANPVPQQLGLTSSHLAYVIYTSGSTGKPKGVMVEHRQLACQITSLRRQWQLTNADRVLQFNNI
AFDVATSEIFGALISGARLVLRTAEWLSSTTKFWALCESFGITYIDVPTQFWSRLDDDATQHLPPRLKVICIGGE
AAPSQTVRRWLERHPGRPVLANCYGPTETTVTATVGCPDRNDSHHVSIGRPIANTRIYLLDGHGQPVPLGAVGEI
YIGGAGVARGYLNRPQLTAERFLQDPFCNEPGARMYRTGDLARYRANGNIEYLGRADQQVKIRGFRIELGEIEAR
LAAHDSVREAVVIAREDGGNKRLVAYVTPRSDAAIEVSALRAHLARQLPEYMVPAAFVQIDALPLTPNGKVDRQA
LPQPDAA
> SEQ ID NO: 180 -Arg1B
SRTTDAVSTIPLADRQQPLALSFAQERQWFLWQLEPESAAYHIPSALRLRGRLDVDALQRSFDSLVARHETLRTR
FRLEGGRSYQQVQPAVSVSIEREQFGEEGLIERIQAIVVQPFDLERGPLLRVNLLQLAEDDHVLVLVQHHIVSDG
WSMQVMVEELVQLYAAYSQGLDVVLPALPIQYADYALWQRSWMEAGEKERQLAYWTGLLGGEQPVLELPFDRPRP
ARQSHRGAQLGFELSRELVEAVRALAQREGASSFMLLLASFQALLYRYSGQADIRVGVPIANRNRVETERLIGFF
VNTQVLKADLDGRMGFDELLAQARQRALEAQAHQDLPFEQLVEALQPERNASHNPLFQVLFNHQSEIRSVTPEVQ
LEDLRLEGLAWDGQTAQFDLTLDIQEDENGIWASFDYATDLFDASTVERLAGHWRNLLRGIVANPRQRLGELPLL
DLPERNLLLQTWNDTRADYPYEQCVHQLFEEQVRKTPEAIAVVQDDIELSYAQLNVRANRLAHYLIKQGVRPDTR
VAICVERSFAMVIGLLAILKAGGTYLPLDPTHPSERLVELLDDAQPVVLLADATGRRALGTHVPNTTTTLSLDEP
LPADAQSEATTSANPVPQQLGLTSSHLAYVIYTSGSTGKPKGVMVEHRQLACQITSLRRQWQLTNADRVLQFNNI
AFDVATSEIFGALISGARLVLRTAEWLSSTTKFWALCESFGITYIDVPTQFWSRLDDDATQHLPPRLKVICIGGE
AAPSQTVRRWLERHPGRPVLANCYGPTETTVTATVGCPDRNDSHHVSIGRPIANTRIYLLDGHGQPVPLGAVGEI
YIGGAGVARGYLNRPQLTAERFLQDPFCNEPGARMYRTGDLARYRANGNIEYLGRADQQVKIRGFRIELGEIEAR
LAAHDSVREAVVIAREDGGNKRLVAYVTPRSDAAIEVSALRAHLARQLPEYMVPAAFVQIDALPLTPNGKVDRQA
LPQPDAA
> SEQ ID NO: 182 -Arg1D
SRTTDAVSTIPLADRQQPLALSFAQERQWFLWQLEPESAAYHIPSALRLRGRLDVDALQRSFDSLVARHETLRTR
FRLEGGRSYQQVQPAVSVSIEREQFGEEGLIERIQAIVVQPFDLERGPLLRVNLLQLAEDDHVLVLVQHHIVSDG
WSMQVMVEELVQLYAAYSQGLDVVLPALPIQYADYALWQRSWMEAGEKERQLAYWTGLLGGEQPVLELPFDRPRP
ARQSHRGAQLGFELSRELVEAVRALAQREGASSFMLLLASFQALLYRYSGQADIRVGVPIANRNRVETERLIGFF
VNTQVLKADLDGRMGFDELLAQARQRALEAQAHQDLPFEQLVEALQPERNASHNPLFQVLFNHQSEIRSVTPEVQ
LEDLRLEGLAWDGQTAQFDLTLDIQEDENGIWASFDYATDLFDASTVERLAGHWRNLLRGIVANPRQRLGELPLL
DAPERRQTLSEWNDTRADYPYEQCVHQLFEEQVRKTPEAIAVVQDDIELSYAQLNVRANRLAHYLIKQGVRPDTR
VAICVERSFAMVIGLLAILKAGGTYLPLDPTHPSERLVELLDDAQPVVLLADATGRRALGTHVPNTTTTLSLDEP
LPADAQSEATTSANPVPQQLGLTSSHLAYVIYTSGSTGKPKGVMVEHRQLACQITSLRRQWQLTNADRVLQFNNI
AFDVATSEIFGALISGARLVLRTAEWLSSTTKFWALCESFGITYIDVPTQFWSRLDDDATQHLPPRLKVICIGGE
AAPSQTVRRWLERHPGRPVLANCYGPTETTVTATVGCPDRNDSHHVSIGRPIANTRIYLLDGHGQPVPLGAVGEI
YIGGAGVARGYLNRPQLTAERFLQDPFCNEPGARMYRTGDLARYRANGNIEYLGRADQQVKIRGFRIELGEIEAR
LAAHDSVREAVVIAREDGGNKRLVAYVTPRSDAAIEVSALRAHLARQLPEYMVPAAFVQIDALPLTPNGKVDRQA
LPQPDAA
> SEQ ID NO: 184 -Arg2X
SRTTDAVSTIPLADRQQPLALSFAQERQWFLWQLEPESAAYHIPSALRLRGRLDVDALQRSFDSLVARHETLRTR
FRLEGGRSYQQVQPAVSVSIEREQFGEEGLIERIQAIVVQPFDLERGPLLRVNLLQLAEDDHVLVLVQHHIVSDG
WSMQVMVEELVQLYAAYSQGLDVVLPALPIQYADYALWQRSWMEAGEKERQLAYWTGLLGGEQPVLELPFDRPRP
ARQSHRGAQLGFELSRELVEAVRALAQREGASSFMLLLASFQALLYRYSGQADIRVGVPIANRNRVETERLIGFF
VNTQVLKADLDGRMGFDELLAQARQRALEAQAHQDLPFEQLVEALQPERNASHNPLFQVLFNHQSEIRSVTPEVQ
LEDLRLEGLAWDGQTAQFDLTLDIQEDENGIWASFDYATDLFDASTVERLAGHWRNLLRGIVANPSSPIRDLVLL
DDSEHAQLVLGWNATAAPLPECTLHQLFEQQARRAPDRIAVVDGHTELTYAELNAKANRLAHHLRSLGVGPDVLV
ALCMERSADLLVGLLAVLKAGGAYLPLDPAYPAARLAYMLDDAMPAVLLTESRWLTHLSSHQVPVCCLDREWPSL
ARFPDSDPPAAAMPPNVAYVIYTSGSTGNPKGVLTTHRNVVNQLLGHARLCELSDSDRVLQFASIGFDVSVEEIE
ATLLAGATLVLRSEELLEGGAVFSEWVSRHALTVLDLPTAFWHEWVRCLDEGEAFLPPMLRLVVIGGEKARADAA
HAWLRLTQARPIRLINAYGPTETTVGVTAYELPPDFTGLDIPIGRPCPNTQLYILDTEQQPVPIGACGELYIAGA
GVARGYLRRPGLTGEKFVANPFDAGTRMYRSGDLVRYLPDGNIVYLGRIDEQVKIRGFRIEPGEIEAGLMALEGV
RQAVVVTREDSPGNRRLAAYVVAQDGAVVQAAKLRAGLQARLPEYMVPTHILLLGQLPLTPNGKMDRKALPQPDA
A
> SEQ ID NO: 186 -Arg2B
SRTTDAVSTIPLADRQQPLALSFAQERQWFLWQLEPESAAYHIPSALRLRGRLDVDALQRSFDSLVARHETLRTR
FRLEGGRSYQQVQPAVSVSIEREQFGEEGLIERIQAIVVQPFDLERGPLLRVNLLQLAEDDHVLVLVQHHIVSDG
WSMQVMVEELVQLYAAYSQGLDVVLPALPIQYADYALWQRSWMEAGEKERQLAYWTGLLGGEQPVLELPFDRPRP
ARQSHRGAQLGFELSRELVEAVRALAQREGASSFMLLLASFQALLYRYSGQADIRVGVPIANRNRVETERLIGFF
VNTQVLKADLDGRMGFDELLAQARQRALEAQAHQDLPFEQLVEALQPERNASHNPLFQVLFNHQSEIRSVTPEVQ
LEDLRLEGLAWDGQTAQFDLTLDIQEDENGIWASFDYATDLFDASTVERLAGHWRNLLRGIVANPRQRLGELPLL
DDSEHAQLVLGWNATAAPLPECTLHQLFEQQARRAPDRIAVVDGHTELTYAELNAKANRLAHHLRSLGVGPDVLV
ALCMERSADLLVGLLAVLKAGGAYLPLDPAYPAARLAYMLDDAMPAVLLTESRWLTHLSSHQVPVCCLDREWPSL
ARFPDSDPPAAAMPPNVAYVIYTSGSTGNPKGVLTTHRNVVNQLLGHARLCELSDSDRVLQFASIGFDVSVEEIF
ATLLAGATLVLRSEELLEGGAVFSEWVSRHALTVLDLPTAFWHEWVRCLDEGEAFLPPMLRLVVIGGEKARADAA
HAWLRLTQARPIRLINAYGPTETTVGVTAYELPPDFTGLDIPIGRPCPNTQLYILDTEQQPVPIGACGELYIAGA
GVARGYLRRPGLTGEKFVANPFDAGTRMYRSGDLVRYLPDGNIVYLGRIDEQVKIRGFRIEPGEIEAGLMALEGV
RQAVVVTREDSPGNRRLAAYVVAQDGAVVQAAKLRAGLQARLPEYMVPTHILLLGQLPLTPNGKMDRKALPQPDA
A
> SEQ ID NO: 188 -Arg2D
SRTTDAVSTIPLADRQQPLALSFAQERQWFLWQLEPESAAYHIPSALRLRGRLDVDALQRSFDSLVARHETLRTR
FRLEGGRSYQQVQPAVSVSIEREQFGEEGLIERIQAIVVQPFDLERGPLLRVNLLQLAEDDHVLVLVQHHIVSDG
WSMQVMVEELVQLYAAYSQGLDVVLPALPIQYADYALWQRSWMEAGEKERQLAYWTGLLGGEQPVLELPFDRPRP
ARQSHRGAQLGFELSRELVEAVRALAQREGASSFMLLLASFQALLYRYSGQADIRVGVPIANRNRVETERLIGFF
VNTQVLKADLDGRMGFDELLAQARQRALEAQAHQDLPFEQLVEALQPERNASHNPLFQVLFNHQSEIRSVTPEVQ
LEDLRLEGLAWDGQTAQFDLTLDIQEDENGIWASFDYATDLFDASTVERLAGHWRNLLRGIVANPRQRLGELPLL
DAPERRQTLSEWNATAAPLPECTLHQLFEQQARRAPDRIAVVDGHTELTYAELNAKANRLAHHLRSLGVGPDVLV
ALCMERSADLLVGLLAVLKAGGAYLPLDPAYPAARLAYMLDDAMPAVLLTESRWLTHLSSHQVPVCCLDREWPSL
ARFPDSDPPAAAMPPNVAYVIYTSGSTGNPKGVLTTHRNVVNQLLGHARLCELSDSDRVLQFASIGFDVSVEEIF
ATLLAGATLVLRSEELLEGGAVFSEWVSRHALTVLDLPTAFWHEWVRCLDEGEAFLPPMLRLVVIGGEKARADAA
HAWLRLTQARPIRLINAYGPTETTVGVTAYELPPDFTGLDIPIGRPCPNTQLYILDTEQQPVPIGACGELYIAGA
GVARGYLRRPGLTGEKFVANPFDAGTRMYRSGDLVRYLPDGNIVYLGRIDEQVKIRGFRIEPGEIEAGLMALEGV
RQAVVVTREDSPGNRRLAAYVVAQDGAVVQAAKLRAGLQARLPEYMVPTHILLLGQLPLTPNGKMDRKALPQPDA
A
> SEQ ID NO: 190 -SerD1
SRTTDAVSTIPLADRQQPLALSFAQERQWFLWQLEPESAAYHIPSALRLRGRLDVDALQRSFDSLVARHETLRTR
FRLEGGRSYQQVQPAVSVSIEREQFGEEGLIERIQAIVVQPFDLERGPLLRVNLLQLAEDDHVLVLVQHHIVSDG
WSMQVMVEELVQLYAAYSQGLDVVLPALPIQYADYALWQRSWMEAGEKERQLAYWTGLLGGEQPVLELPFDRPRP
ARQSHRGAQLGFELSRELVEAVRALAQREGASSFMLLLASFQALLYRYSGQADIRVGVPIANRNRVETERLIGFF
VNTQVLKADLDGRMGFDELLAQARQRALEAQAHQDLPFEQLVEALQPERNASHNPLFQVLFNHQSEIRSVTPEVQ
LEDLRLEGLAWDGQTAQFDLTLDIQEDENGIWASFDYATDLFDASTVERLAGHWRNLLRGIVANPRQRLGELPLL
DAAEQQQIVRDWNATAADFPGEHCLHSLIEAQVQATPDAPALIFAAEQLSYAQLNARANQLAHRLREAGVGPDVL
VGICVERSVDMVIGLLAIIKAGGAYVPLDPDYPEDRLAYMMQDSGIGLLLTQSALLQGLPVQVQSLCLDQEGDWL
DGYSTANPINLSHPQNLAYVIYTSGSTGKPKGAGNSHRALVNRLHWMQKAYALDGSDTVLQKTPFSFDVSVWEFF
WPLLTGARLAVALPGDHRDPERLVQTIREHQVTTLHFVPSMLQAFLTHPQVEGCNSLRRVVCSGEALPSELAGQV
LKRLPQTGLFNLYGPTEAAIDVTHWTCTKDDVLSVPIGGTIPDLSWYILDRDLNPVPRGAVGELYIGRAGLARGY
LRRPGLSATRFVPNPFPGGAGERLYRTGDLARFQADGNIEYIGRIDHQVKVRGFRIELGEIEAALAGLAGVRDAV
VLAHDGVGGTQLVGYVVADSAEDAERLRESLRESLKRHLPDYMVPAHLMLLERMPLTVNGKLDRQALPQPDAA
> SEQ ID NO: 192 -SerD2
SRTTDAVSTIPLADRQQPLALSFAQERQWFLWQLEPESAAYHIPSALRLRGRLDVDALQRSFDSLVARHETLRTR
FRLEGGRSYQQVQPAVSVSIEREQFGEEGLIERIQAIVVQPFDLERGPLLRVNLLQLAEDDHVLVLVQHHIVSDG
WSMQVMVEELVQLYAAYSQGLDVVLPALPIQYADYALWQRSWMEAGEKERQLAYWTGLLGGEQPVLELPFDRPRP
ARQSHRGAQLGFELSRELVEAVRALAQREGASSFMLLLASFQALLYRYSGQADIRVGVPIANRNRVETERLIGFF
VNTQVLKADLDGRMGFDELLAQARQRALEAQAHQDLPFEQLVEALQPERNASHNPLFQVLFNHQSEIRSVTPEVQ
LEDLRLEGLAWDGQTAQFDLTLDIQEDENGIWASFDYATDLFDASTVERLAGHWRNLLRGIVANPRQRLGELPLL
DAAEQQQIVRDWNATAADFPGEHCLHSLIEAQVQATPDAPALIFAAEQLSYAQLNARANQLAHRLREAGVGPDVL
VGICVERSVDMVIGLLAIIKAGGAYVPLDPDYPEDRLAYMMQDSGIGLLLTQSALLQGLPVQVQSLCLDQEGDWL
DGYSTANPINLSHPQNLAYVIYTSGSTGKPKGAGNSHRALVNRLHWMQKAYALDGSDTVLQKTPFSFDVSVWEFF
WPLLTGARLAVALPGDHRDPERLVQTIREHQVTTLHFVPSMLQAFLTHPQVEGCNSLRRVVCSGEALPSELAGQV
LKRLPQTGLFNLYGPTEAAIDVTHWTCTKDDVLSVPIGRPIDNLKTHILDRDLNPVPRGAVGELYIGRAGLARGY
LRRPGLSATRFVPNPFPGGAGERLYRTGDLARFQADGNIEYIGRIDHQVKVRGFRIELGEIEAALAGLAGVRDAV
VLAHDGVGGTQLVGYVVADSAEDAERLRESLRESLKRHLPDYMVPAHLMLLERMPLTVNGKLDRQALPQPDAA
> SEQ ID NO: 194 -SerD3
SRTTDAVSTIPLADRQQPLALSFAQERQWFLWQLEPESAAYHIPSALRLRGRLDVDALQRSFDSLVARHETLRTR
FRLEGGRSYQQVQPAVSVSIEREQFGEEGLIERIQAIVVQPFDLERGPLLRVNLLQLAEDDHVLVLVQHHIVSDG
WSMQVMVEELVQLYAAYSQGLDVVLPALPIQYADYALWQRSWMEAGEKERQLAYWTGLLGGEQPVLELPFDRPRP
ARQSHRGAQLGFELSRELVEAVRALAQREGASSFMLLLASFQALLYRYSGQADIRVGVPIANRNRVETERLIGFF
VNTQVLKADLDGRMGFDELLAQARQRALEAQAHQDLPFEQLVEALQPERNASHNPLFQVLFNHQSEIRSVTPEVQ
LEDLRLEGLAWDGQTAQFDLTLDIQEDENGIWASFDYATDLFDASTVERLAGHWRNLLRGIVANPRQRLGELPLL
DAAEQQQIVRDWNATAADFPGEHCLHSLIEAQVQATPDAPALIFAAEQLSYAQLNARANQLAHRLREAGVGPDVL
VGICVERSVDMVIGLLAIIKAGGAYVPLDPDYPEDRLAYMMQDSGIGLLLTQSALLQGLPVQVQSLCLDQEGDWL
DGYSTANPINLSHPQNLAYVIYTSGSTGKPKGAGNSHRALVNRLHWMQKAYALDGSDTVLQKTPFSFDVSVWEFF
WPLLTGARLAVALPGDHRDPERLVQTIREHQVTTLHFVPSMLQAFLTHPQVEGCNSLRRVVCSGEALPSELAGQV
LKRLPQTGLFNLYGPTEAAIDVTHWTCTKDDVLSVPIGRPIDNLKTHILDDGLLPAAQGVSAELYLGGIGLARGY
HRRPGLSATRFVPNPFPGGAGERLYRTGDLARFQADGNIEYIGRIDHQVKVRGFRIELGEIEAALAGLAGVRDAV
VLAHDGVGGTQLVGYVVADSAEDAERLRESLRESLKRHLPDYMVPAHLMLLERMPLTVNGKLDRQALPQPDAA
> SEQ ID NO: 196 -SerD4
SRTTDAVSTIPLADRQQPLALSFAQERQWFLWQLEPESAAYHIPSALRLRGRLDVDALQRSFDSLVARHETLRTR
FRLEGGRSYQQVQPAVSVSIEREQFGEEGLIERIQAIVVQPFDLERGPLLRVNLLQLAEDDHVLVLVQHHIVSDG
WSMQVMVEELVQLYAAYSQGLDVVLPALPIQYADYALWQRSWMEAGEKERQLAYWTGLLGGEQPVLELPFDRPRP
ARQSHRGAQLGFELSRELVEAVRALAQREGASSFMLLLASFQALLYRYSGQADIRVGVPIANRNRVETERLIGFF
VNTQVLKADLDGRMGFDELLAQARQRALEAQAHQDLPFEQLVEALQPERNASHNPLFQVLFNHQSEIRSVTPEVQ
LEDLRLEGLAWDGQTAQFDLTLDIQEDENGIWASFDYATDLFDASTVERLAGHWRNLLRGIVANPRQRLGELPLL
DAAEQQQIVRDWNATAADFPGEHCLHSLIEAQVQATPDAPALIFAAEQLSYAQLNARANQLAHRLREAGVGPDVL
VGICVERSVDMVIGLLAIIKAGGAYVPLDPDYPEDRLAYMMQDSGIGLLLTQSALLQGLPVQVQSLCLDQEGDWL
DGYSTANPINLSHPQNLAYVIYTSGSTGKPKGAGNSHRALVNRLHWMQKAYALDGSDTVLQKTPFSFDVSVWEFF
WPLLTGARLAVALPGDHRDPERLVQTIREHQVTTLHFVPSMLQAFLTHPQVEGCNSLRRVVCSGEALPSELAGQV
LKRLPQTGLFNLYGPTEAAIDVTHWTCTKDDVLSVPIGRPIDNLKTHILDDGLLPAAQGVSAELYLGGIGLARGY
HNRAALTAERFVPDPFDEQGGRLYRTGDLARYQADGNIEYIGRIDHQVKVRGFRIELGEIEAALAGLAGVRDAVV
LAHDGVGGTQLVGYVVADSAEDAERLRESLRESLKRHLPDYMVPAHLMLLERMPLTVNGKLDRQALPQPDAA
> SEQ ID NO: 198 -SerD5
SRTTDAVSTIPLADRQQPLALSFAQERQWFLWQLEPESAAYHIPSALRLRGRLDVDALQRSFDSLVARHETLRTR
FRLEGGRSYQQVQPAVSVSIEREQFGEEGLIERIQAIVVQPFDLERGPLLRVNLLQLAEDDHVLVLVQHHIVSDG
WSMQVMVEELVQLYAAYSQGLDVVLPALPIQYADYALWQRSWMEAGEKERQLAYWTGLLGGEQPVLELPFDRPRP
ARQSHRGAQLGFELSRELVEAVRALAQREGASSFMLLLASFQALLYRYSGQADIRVGVPIANRNRVETERLIGFF
VNTQVLKADLDGRMGFDELLAQARQRALEAQAHQDLPFEQLVEALQPERNASHNPLFQVLFNHQSEIRSVTPEVQ
LEDLRLEGLAWDGQTAQFDLTLDIQEDENGIWASFDYATDLFDASTVERLAGHWRNLLRGIVANPRQRLGELPLL
DAAEQQQIVRDWNATAADFPGEHCLHSLIEAQVQATPDAPALIFAAEQLSYAQLNARANQLAHRLREAGVGPDVL
VGICVERSVDMVIGLLAIIKAGGAYVPLDPDYPEDRLAYMMQDSGIGLLLTQSALLQGLPVQVQSLCLDQEGDWL
DGYSTANPINLSHPQNLAYVIYTSGSTGKPKGAGNSHRALVNRLHWMQKAYALDGSDTVLQKTPFSFDVSVWEFF
WPLLTGARLAVALPGDHRDPERLVQTIREHQVTTLHFVPSMLQAFLTHPQVEGCNSLRRVVCSGEALPSELAGQV
LKRLPQTGLFNLYGPTEAAIDVTHWTCTKDDVLSVPIGRPIDNLKTHILDDGLLPAAQGVSAELYLGGIGLARGY
HNRAALTAERFVPDPFDEQGGRLYRTGDLARYRDEGVIEYAGRIDHQVKVRGFRIELGEIEAALAGLAGVRDAVV
LAHDGVGGTQLVGYVVADSAEDAERLRESLRESLKRHLPDYMVPAHLMLLERMPLTVNGKLDRQALPQPDAA
> SEQ ID NO: 200 -SerD6
SRTTDAVSTIPLADRQQPLALSFAQERQWFLWQLEPESAAYHIPSALRLRGRLDVDALQRSFDSLVARHETLRTR
FRLEGGRSYQQVQPAVSVSIEREQFGEEGLIERIQAIVVQPFDLERGPLLRVNLLQLAEDDHVLVLVQHHIVSDG
WSMQVMVEELVQLYAAYSQGLDVVLPALPIQYADYALWQRSWMEAGEKERQLAYWTGLLGGEQPVLELPFDRPRP
ARQSHRGAQLGFELSRELVEAVRALAQREGASSFMLLLASFQALLYRYSGQADIRVGVPIANRNRVETERLIGFF
VNTQVLKADLDGRMGFDELLAQARQRALEAQAHQDLPFEQLVEALQPERNASHNPLFQVLFNHQSEIRSVTPEVQ
LEDLRLEGLAWDGQTAQFDLTLDIQEDENGIWASFDYATDLFDASTVERLAGHWRNLLRGIVANPRQRLGELPLL
DAAEQQQIVRDWNATAADFPGEHCLHSLIEAQVQATPDAPALIFAAEQLSYAQLNARANQLAHRLREAGVGPDVL
VGICVERSVDMVIGLLAIIKAGGAYVPLDPDYPEDRLAYMMQDSGIGLLLTQSALLQGLPVQVQSLCLDQEGDWL
DGYSTANPINLSHPQNLAYVIYTSGSTGKPKGAGNSHRALVNRLHWMQKAYALDGSDTVLQKTPFSFDVSVWEFF
WPLLTGARLAVALPGDHRDPERLVQTIREHQVTTLHFVPSMLQAFLTHPQVEGCNSLRRVVCSGEALPSELAGQV
LKRLPQTGLFNLYGPTEAAIDVTHWTCTKDDVLSVPIGRPIDNLKTHILDDGLLPAAQGVSAELYLGGIGLARGY
HNRAALTAERFVPDPFDEQGGRLYRTGDLARYRDEGVIEYAGRIDHQVKVRGFRIELGEIEAALAGLAGVRDAVV
LAHDGVGGTQLVGYVVADSAEDAERLRESLRESLKRHLPDYMVPAHLMLLERMPLTVNGKLDRQALPQPDAA
> SEQ ID NO: 202 -SerD7
SRTTDAVSTIPLADRQQPLALSFAQERQWFLWQLEPESAAYHIPSALRLRGRLDVDALQRSFDSLVARHETLRTR
FRLEGGRSYQQVQPAVSVSIEREQFGEEGLIERIQAIVVQPFDLERGPLLRVNLLQLAEDDHVLVLVQHHIVSDG
WSMQVMVEELVQLYAAYSQGLDVVLPALPIQYADYALWQRSWMEAGEKERQLAYWTGLLGGEQPVLELPFDRPRP
ARQSHRGAQLGFELSRELVEAVRALAQREGASSFMLLLASFQALLYRYSGQADIRVGVPIANRNRVETERLIGFF
VNTQVLKADLDGRMGFDELLAQARQRALEAQAHQDLPFEQLVEALQPERNASHNPLFQVLFNHQSEIRSVTPEVQ
LEDLRLEGLAWDGQTAQFDLTLDIQEDENGIWASFDYATDLFDASTVERLAGHWRNLLRGIVANPRQRLGELPLL
DAAEQQQIVRDWNATAADFPGEHCLHSLIEAQVQATPDAPALIFAAEQLSYAQLNARANQLAHRLREAGVGPDVL
VGICVERSVDMVIGLLAIIKAGGAYVPLDPDYPEDRLAYMMQDSGIGLLLTQSALLQGLPVQVQSLCLDQEGDWL
DGYSTANPINLSHPQNLAYVIYTSGSTGKPKGAGNSHRALVNRLHWMQKAYALDGSDTVLQKTPFSFDVSVWEFF
WPLLTGARLAVALPGDHRDPERLVQTIREHQVTTLHFVPSMLQAFLTHPQVEGCNSLRRVVCSGEALPSELAGQV
LKRLPQTGLFNLYGPTEAAIDVTHWTCTKDDVLSVPIGRPIDNLKTHILDDGLLPAAQGVSAELYLGGIGLARGY
HNRAALTAERFVPDPFDEQGGRLYRTGDLARYRDEGVIEYAGRIDHQVKIRGLRIELGEIEAALAGLAGVRDAVV
LAHDGVGGTQLVGYVVADSAEDAERLRESLRESLKRHLPDYMVPAHLMLLERMPLTVNGKLDRQALPQPDAA
> SEQ ID NO: 204 -fhornDl
SRTTDAVSTIPLADRQQPLALSFAQERQWFLWQLEPESAAYHIPSALRLRGRLDVDALQRSFDSLVARHETLRTR
FRLEGGRSYQQVQPAVSVSIEREQFGEEGLIERIQAIVVQPFDLERGPLLRVNLLQLAEDDHVLVLVQHHIVSDG
WSMQVMVEELVQLYAAYSQGLDVVLPALPIQYADYALWQRSWMEAGEKERQLAYWTGLLGGEQPVLELPFDRPRP
ARQSHRGAQLGFELSRELVEAVRALAQREGASSFMLLLASFQALLYRYSGQADIRVGVPIANRNRVETERLIGFF
VNTQVLKADLDGRMGFDELLAQARQRALEAQAHQDLPFEQLVEALQPERNASHNPLFQVLFNHQSEIRSVTPEVQ
LEDLRLEGLAWDGQTAQFDLTLDIQEDENGIWASFDYATDLFDASTVERLAGHWRNLLRGIVANPRQRLGELPLL
DNAERQQILQLWNQSDAGFSAKRLVHELVADRAGETPEAVAVKFGEQQLTYGELDRQANRLAHALIARGVGPEVR
VAIAMPRSAEIMVAFLAVMKAGGVYVPLDIEYPRDRLLYMMQDSRARLLLTHSAVQQRLPIPDGLEALAVDQAQA
WSADDDTAPEVALDGDNLAYVIYTSGSTGMPKGVAVSHGPLVAHIIATGERYETSPADCELHFMSFAFDGSHEGW
MHPLINGASVLIRDDSLWLPEYTYQQMHRHHVTMAVFPPVYLQQLAEHAERDGNPPKVRVYCFGGDAVAQASYDL
AWRALKPTYLFNGYGPTETVVTPLLWKARRGDPCGAVYAPIGGTIPDLSWYILDRDLNPVPRGAVGELYIGRAGL
ARGYLRRPGLSATRFVPNPFPGGAGERLYRTGDLARFQADGNIEYIGRIDHQVKVRGFRIELGEIEAALAGLAGV
RDAVVLAHDGVGGTQLVGYVVADSAEDAERLRESLRESLKRHLPDYMVPAHLMLLERMPLTVNGKLDRQALPQPD
AA
> SEQ ID NO: 206 -fhornD2
SRTTDAVSTIPLADRQQPLALSFAQERQWFLWQLEPESAAYHIPSALRLRGRLDVDALQRSFDSLVARHETLRTR
FRLEGGRSYQQVQPAVSVSIEREQFGEEGLIERIQAIVVQPFDLERGPLLRVNLLQLAEDDHVLVLVQHHIVSDG
WSMQVMVEELVQLYAAYSQGLDVVLPALPIQYADYALWQRSWMEAGEKERQLAYWTGLLGGEQPVLELPFDRPRP
ARQSHRGAQLGFELSRELVEAVRALAQREGASSFMLLLASFQALLYRYSGQADIRVGVPIANRNRVETERLIGFF
VNTQVLKADLDGRMGFDELLAQARQRALEAQAHQDLPFEQLVEALQPERNASHNPLFQVLFNHQSEIRSVTPEVQ
LEDLRLEGLAWDGQTAQFDLTLDIQEDENGIWASFDYATDLFDASTVERLAGHWRNLLRGIVANPRQRLGELPLL
DNAERQQILQLWNQSDAGFSAKRLVHELVADRAGETPEAVAVKFGEQQLTYGELDRQANRLAHALIARGVGPEVR
VAIAMPRSAEIMVAFLAVMKAGGVYVPLDIEYPRDRLLYMMQDSRARLLLTHSAVQQRLPIPDGLEALAVDQAQA
WSADDDTAPEVALDGDNLAYVIYTSGSTGMPKGVAVSHGPLVAHIIATGERYETSPADCELHFMSFAFDGSHEGW
MHPLINGASVLIRDDSLWLPEYTYQQMHRHHVTMAVFPPVYLQQLAEHAERDGNPPKVRVYCFGGDAVAQASYDL
AWRALKPTYLFNGYGPTETVVTPLLWKARRGDPCGAVYAPIGTLLGNRSGYVLDRDLNPVPRGAVGELYIGRAGL
ARGYLRRPGLSATRFVPNPFPGGAGERLYRTGDLARFQADGNIEYIGRIDHQVKVRGFRIELGEIEAALAGLAGV
RDAVVLAHDGVGGTQLVGYVVADSAEDAERLRESLRESLKRHLPDYMVPAHLMLLERMPLTVNGKLDRQALPQPD
AA
> SEQ ID NO: 208 -fhornD3
SRTTDAVSTIPLADRQQPLALSFAQERQWFLWQLEPESAAYHIPSALRLRGRLDVDALQRSFDSLVARHETLRTR
FRLEGGRSYQQVQPAVSVSIEREQFGEEGLIERIQAIVVQPFDLERGPLLRVNLLQLAEDDHVLVLVQHHIVSDG
WSMQVMVEELVQLYAAYSQGLDVVLPALPIQYADYALWQRSWMEAGEKERQLAYWTGLLGGEQPVLELPFDRPRP
ARQSHRGAQLGFELSRELVEAVRALAQREGASSFMLLLASFQALLYRYSGQADIRVGVPIANRNRVETERLIGFF
VNTQVLKADLDGRMGFDELLAQARQRALEAQAHQDLPFEQLVEALQPERNASHNPLFQVLFNHQSEIRSVTPEVQ
LEDLRLEGLAWDGQTAQFDLTLDIQEDENGIWASFDYATDLFDASTVERLAGHWRNLLRGIVANPRQRLGELPLL
DNAERQQILQLWNQSDAGFSAKRLVHELVADRAGETPEAVAVKFGEQQLTYGELDRQANRLAHALIARGVGPEVR
VAIAMPRSAEIMVAFLAVMKAGGVYVPLDIEYPRDRLLYMMQDSRARLLLTHSAVQQRLPIPDGLEALAVDQAQA
WSADDDTAPEVALDGDNLAYVIYTSGSTGMPKGVAVSHGPLVAHIIATGERYETSPADCELHFMSFAFDGSHEGW
MHPLINGASVLIRDDSLWLPEYTYQQMHRHHVTMAVFPPVYLQQLAEHAERDGNPPKVRVYCFGGDAVAQASYDL
AWRALKPTYLFNGYGPTETVVTPLLWKARRGDPCGAVYAPIGTLLGNRSGYVLDAQLNLQPIGVAGELYLGGEGV
ARGYLRRPGLSATRFVPNPFPGGAGERLYRTGDLARFQADGNIEYIGRIDHQVKVRGFRIELGEIEAALAGLAGV
RDAVVLAHDGVGGTQLVGYVVADSAEDAERLRESLRESLKRHLPDYMVPAHLMLLERMPLTVNGKLDRQALPQPD
AA
> SEQ ID NO: 210 - fhornD4
SRTTDAVSTIPLADRQQPLALSFAQERQWFLWQLEPESAAYHIPSALRLRGRLDVDALQRSFDSLVARHETLRTR
FRLEGGRSYQQVQPAVSVSIEREQFGEEGLIERIQAIVVQPFDLERGPLLRVNLLQLAEDDHVLVLVQHHIVSDG
WSMQVMVEELVQLYAAYSQGLDVVLPALPIQYADYALWQRSWMEAGEKERQLAYWTGLLGGEQPVLELPFDRPRP
ARQSHRGAQLGFELSRELVEAVRALAQREGASSFMLLLASFQALLYRYSGQADIRVGVPIANRNRVETERLIGFF
VNTQVLKADLDGRMGFDELLAQARQRALEAQAHQDLPFEQLVEALQPERNASHNPLFQVLFNHQSEIRSVTPEVQ
LEDLRLEGLAWDGQTAQFDLTLDIQEDENGIWASFDYATDLFDASTVERLAGHWRNLLRGIVANPRQRLGELPLL
DNAERQQILQLWNQSDAGFSAKRLVHELVADRAGETPEAVAVKFGEQQLTYGELDRQANRLAHALIARGVGPEVR
VAIAMPRSAEIMVAFLAVMKAGGVYVPLDIEYPRDRLLYMMQDSRARLLLTHSAVQQRLPIPDGLEALAVDQAQA
WSADDDTAPEVALDGDNLAYVIYTSGSTGMPKGVAVSHGPLVAHIIATGERYETSPADCELHFMSFAFDGSHEGW
MHPLINGASVLIRDDSLWLPEYTYQQMHRHHVTMAVFPPVYLQQLAEHAERDGNPPKVRVYCFGGDAVAQASYDL
AWRALKPTYLFNGYGPTETVVTPLLWKARRGDPCGAVYAPIGTLLGNRSGYVLDAQLNLQPIGVAGELYLGGEGV
ARGYLERPALTAERFVPDPFGKPGSRVYRSGDLTRGQADGNIEYIGRIDHQVKVRGFRIELGEIEAALAGLAGVR
DAVVLAHDGVGGTQLVGYVVADSAEDAERLRESLRESLKRHLPDYMVPAHLMLLERMPLTVNGKLDRQALPQPDA
A
> SEQ ID NO: 212 -fhornD5
SRTTDAVSTIPLADRQQPLALSFAQERQWFLWQLEPESAAYHIPSALRLRGRLDVDALQRSFDSLVARHETLRTR
FRLEGGRSYQQVQPAVSVSIEREQFGEEGLIERIQAIVVQPFDLERGPLLRVNLLQLAEDDHVLVLVQHHIVSDG
WSMQVMVEELVQLYAAYSQGLDVVLPALPIQYADYALWQRSWMEAGEKERQLAYWTGLLGGEQPVLELPFDRPRP
ARQSHRGAQLGFELSRELVEAVRALAQREGASSFMLLLASFQALLYRYSGQADIRVGVPIANRNRVETERLIGFF
VNTQVLKADLDGRMGFDELLAQARQRALEAQAHQDLPFEQLVEALQPERNASHNPLFQVLFNHQSEIRSVTPEVQ
LEDLRLEGLAWDGQTAQFDLTLDIQEDENGIWASFDYATDLFDASTVERLAGHWRNLLRGIVANPRQRLGELPLL
DNAERQQILQLWNQSDAGFSAKRLVHELVADRAGETPEAVAVKFGEQQLTYGELDRQANRLAHALIARGVGPEVR
VAIAMPRSAEIMVAFLAVMKAGGVYVPLDIEYPRDRLLYMMQDSRARLLLTHSAVQQRLPIPDGLEALAVDQAQA
WSADDDTAPEVALDGDNLAYVIYTSGSTGMPKGVAVSHGPLVAHIIATGERYETSPADCELHFMSFAFDGSHEGW
MHPLINGASVLIRDDSLWLPEYTYQQMHRHHVTMAVFPPVYLQQLAEHAERDGNPPKVRVYCFGGDAVAQASYDL
AWRALKPTYLFNGYGPTETVVTPLLWKARRGDPCGAVYAPIGTLLGNRSGYVLDAQLNLQPIGVAGELYLGGEGV
ARGYLERPALTAERFVPDPFGKPGSRVYRSGDLTRGRPDGVVDYLGRIDHQVKVRGFRIELGEIEAALAGLAGVR
DAVVLAHDGVGGTQLVGYVVADSAEDAERLRESLRESLKRHLPDYMVPAHLMLLERMPLTVNGKLDRQALPQPDA
A
> SEQ ID NO: 214 -fhornD6
SRTTDAVSTIPLADRQQPLALSFAQERQWFLWQLEPESAAYHIPSALRLRGRLDVDALQRSFDSLVARHETLRTR
FRLEGGRSYQQVQPAVSVSIEREQFGEEGLIERIQAIVVQPFDLERGPLLRVNLLQLAEDDHVLVLVQHHIVSDG
WSMQVMVEELVQLYAAYSQGLDVVLPALPIQYADYALWQRSWMEAGEKERQLAYWTGLLGGEQPVLELPFDRPRP
ARQSHRGAQLGFELSRELVEAVRALAQREGASSFMLLLASFQALLYRYSGQADIRVGVPIANRNRVETERLIGFF
VNTQVLKADLDGRMGFDELLAQARQRALEAQAHQDLPFEQLVEALQPERNASHNPLFQVLFNHQSEIRSVTPEVQ
LEDLRLEGLAWDGQTAQFDLTLDIQEDENGIWASFDYATDLFDASTVERLAGHWRNLLRGIVANPRQRLGELPLL
DNAERQQILQLWNQSDAGFSAKRLVHELVADRAGETPEAVAVKFGEQQLTYGELDRQANRLAHALIARGVGPEVR
VAIAMPRSAEIMVAFLAVMKAGGVYVPLDIEYPRDRLLYMMQDSRARLLLTHSAVQQRLPIPDGLEALAVDQAQA
WSADDDTAPEVALDGDNLAYVIYTSGSTGMPKGVAVSHGPLVAHIIATGERYETSPADCELHFMSFAFDGSHEGW
MHPLINGASVLIRDDSLWLPEYTYQQMHRHHVTMAVFPPVYLQQLAEHAERDGNPPKVRVYCFGGDAVAQASYDL
AWRALKPTYLFNGYGPTETVVTPLLWKARRGDPCGAVYAPIGTLLGNRSGYVLDAQLNLQPIGVAGELYLGGEGV
ARGYLERPALTAERFVPDPFGKPGSRVYRSGDLTRGRPDGVVDYLGRVDHQVKVRGFRIELGEIEAALAGLAGVR
DAVVLAHDGVGGTQLVGYVVADSAEDAERLRESLRESLKRHLPDYMVPAHLMLLERMPLTVNGKLDRQALPQPDA
A
> SEQ ID NO: 216 -fhornD7
SRTTDAVSTIPLADRQQPLALSFAQERQWFLWQLEPESAAYHIPSALRLRGRLDVDALQRSFDSLVARHETLRTR
FRLEGGRSYOOVQPAVSVSIEREQFGEEGLIERIQAIVVQPFDLERGPLLRVNLLQLAEDDHVLVLVQHHIVSDG
WSMQVMVEELVQLYAAYSQGLDVVLPALPIQYADYALWQRSWMEAGEKERQLAYWTGLLGGEQPVLELPFDRPRP
ARQSHRGAQLGFELSRELVEAVRALAQREGASSFMLLLASFQALLYRYSGQADIRVGVPIANRNRVETERLIGFF
VNTQVLKADLDGRMGFDELLAQARQRALEAQAHQDLPFEQLVEALQPERNASHNPLFQVLFNHQSEIRSVTPEVQ
LEDLRLEGLAWDGQTAQFDLTLDIQEDENGIWASFDYATDLFDASTVERLAGHWRNLLRGIVANPRQRLGELPLL
DNAERQQILQLWNQSDAGFSAKRLVHELVADRAGETPEAVAVKFGEQQLTYGELDRQANRLAHALIARGVGPEVR
VAIAMPRSAEIMVAFLAVMKAGGVYVPLDIEYPRDRLLYMMQDSRARLLLTHSAVQQRLPIPDGLEALAVDQAQA
WSADDDTAPEVALDGDNLAYVIYTSGSTGMPKGVAVSHGPLVAHIIATGERYETSPADCELHFMSFAFDGSHEGW
MHPLINGASVLIRDDSLWLPEYTYQQMHRHHVTMAVFPPVYLQQLAEHAERDGNPPKVRVYCFGGDAVAQASYDL
AWRALKPTYLFNGYGPTETVVTPLLWKARRGDPCGAVYAPIGTLLGNRSGYVLDAQLNLQPIGVAGELYLGGEGV
ARGYLERPALTAERFVPDPFGKPGSRVYRSGDLTRGRPDGVVDYLGRVDHQVKIRGFRIELGEIEAALAGLAGVR
DAVVLAHDGVGGTQLVGYVVADSAEDAERLRESLRESLKRHLPDYMVPAHLMLLERMPLTVNGKLDRQALPQPDA
A
> SEQ ID NO: 218 -GlyD1
SRTTDAVSTIPLADRQQPLALSFAQERQWFLWQLEPESAAYHIPSALRLRGRLDVDALQRSFDSLVARHETLRTR
FRLEGGRSYQQVQPAVSVSIEREQFGEEGLIERIQAIVVQPFDLERGPLLRVNLLQLAEDDHVLVLVQHHIVSDG
WSMQVMVEELVQLYAAYSQGLDVVLPALPIQYADYALWQRSWMEAGEKERQLAYWTGLLGGEQPVLELPFDRPRP
ARQSHRGAQLGFELSRELVEAVRALAQREGASSFMLLLASFQALLYRYSGQADIRVGVPIANRNRVETERLIGFF
VNTQVLKADLDGRMGFDELLAQARQRALEAQAHQDLPFEQLVEALQPERNASHNPLFQVLFNHQSEIRSVTPEVQ
LEDLRLEGLAWDGQTAQFDLTLDIQEDENGIWASFDYATDLFDASTVERLAGHWRNLLRGIVANPRQRLGELPLL
DGAESRRMLVEWNDTREAYAADRRVHELFEAQAARTPDASAVESQGRALSYAELNRRANQLARHLRRMGVGPEVL
VGICVEKSVEMLVGLLGILKAGGAYVPLDPAFPAERLAFMAEDAELPVLLTESRLTAVVPPNPTRRTVLLDSDWE
LIAGESGDDLSDTGGGENTAYVIYTSGSTGRPKGVQVSHRALVNFLHSMRGRPGIEAGDTLLAVTTLSFDIAGLE
LYLPLLTGARVVVAGREELSDGALLSERISRSGATVMQATPATWRLLLGAGWRGKSDLRIFCGGEALARELANQL
LEKCAELWNLYGPTETTIWSAIHRVETTEGAVSVGGTIPDLSWYILDRDLNPVPRGAVGELYIGRAGLARGYLRR
PGLSATRFVPNPFPGGAGERLYRTGDLARFQADGNIEYIGRIDHQVKVRGFRIELGEIEAALAGLAGVRDAVVLA
HDGVGGTQLVGYVVADSAEDAERLRESLRESLKRHLPDYMVPAHLMLLERMPLTVNGKLDRQALPQPDAA
> SEQ ID NO: 220 -GlyD2
SRTTDAVSTIPLADRQQPLALSFAQERQWFLWQLEPESAAYHIPSALRLRGRLDVDALQRSFDSLVARHETLRTR
FRLEGGRSYQQVQPAVSVSIEREQFGEEGLIERIQAIVVQPFDLERGPLLRVNLLQLAEDDHVLVLVQHHIVSDG
WSMQVMVEELVQLYAAYSQGLDVVLPALPIQYADYALWQRSWMEAGEKERQLAYWTGLLGGEQPVLELPFDRPRP
ARQSHRGAQLGFELSRELVEAVRALAQREGASSFMLLLASFQALLYRYSGQADIRVGVPIANRNRVETERLIGFF
VNTQVLKADLDGRMGFDELLAQARQRALEAQAHQDLPFEQLVEALQPERNASHNPLFQVLFNHQSEIRSVTPEVQ
LEDLRLEGLAWDGQTAQFDLTLDIQEDENGIWASFDYATDLFDASTVERLAGHWRNLLRGIVANPRQRLGELPLL
DGAESRRMLVEWNDTREAYAADRRVHELFEAQAARTPDASAVESQGRALSYAELNRRANQLARHLRRMGVGPEVL
VGICVEKSVEMLVGLLGILKAGGAYVPLDPAFPAERLAFMAEDAELPVLLTESRLTAVVPPNPTRRTVLLDSDWE
LIAGESGDDLSDTGGGENTAYVIYTSGSTGRPKGVQVSHRALVNFLHSMRGRPGIEAGDTLLAVTTLSFDIAGLE
LYLPLLTGARVVVAGREELSDGALLSERISRSGATVMQATPATWRLLLGAGWRGKSDLRIFCGGEALARELANQL
LEKCAELWNLYGPTETTIWSAIHRVETTEGAVSVGRPIANTRVYVLDRDLNPVPRGAVGELYIGRAGLARGYLRR
PGLSATRFVPNPFPGGAGERLYRTGDLARFQADGNIEYIGRIDHQVKVRGFRIELGEIEAALAGLAGVRDAVVLA
HDGVGGTQLVGYVVADSAEDAERLRESLRESLKRHLPDYMVPAHLMLLERMPLTVNGKLDRQALPQPDAA
> SEQ ID NO: 222 -GlyD3
SRTTDAVSTIPLADRQQPLALSFAQERQWFLWQLEPESAAYHIPSALRLRGRLDVDALQRSFDSLVARHETLRTR
FRLEGGRSYQQVQPAVSVSIEREQFGEEGLIERIQAIVVQPFDLERGPLLRVNLLQLAEDDHVLVLVQHHIVSDG
WSMQVMVEELVQLYAAYSQGLDVVLPALPIQYADYALWQRSWMEAGEKERQLAYWTGLLGGEQPVLELPFDRPRP
ARQSHRGAQLGFELSRELVEAVRALAQREGASSFMLLLASFQALLYRYSGQADIRVGVPIANRNRVETERLIGFF
VNTQVLKADLDGRMGFDELLAQARQRALEAQAHQDLPFEQLVEALQPERNASHNPLFQVLFNHQSEIRSVTPEVQ
LEDLRLEGLAWDGQTAQFDLTLDIQEDENGIWASFDYATDLFDASTVERLAGHWRNLLRGIVANPRQRLGELPLL
DGAESRRMLVEWNDTREAYAADRRVHELFEAQAARTPDASAVESQGRALSYAELNRRANQLARHLRRMGVGPEVL
VGICVEKSVEMLVGLLGILKAGGAYVPLDPAFPAERLAFMAEDAELPVLLTESRLTAVVPPNPTRRTVLLDSDWE
LIAGESGDDLSDTGGGENTAYVIYTSGSTGRPKGVQVSHRALVNFLHSMRGRPGIEAGDTLLAVTTLSFDIAGLE
LYLPLLTGARVVVAGREELSDGALLSERISRSGATVMQATPATWRLLLGAGWRGKSDLRIFCGGEALARELANQL
LEKCAELWNLYGPTETTIWSAIHRVETTEGAVSVGRPIANTRVYVLDKNLRPVPAGVPGELLIGGDGLARGYLRR
PGLSATRFVPNPFPGGAGERLYRTGDLARFQADGNIEYIGRIDHQVKVRGFRIELGEIEAALAGLAGVRDAVVLA
HDGVGGTQLVGYVVADSAEDAERLRESLRESLKRHLPDYMVPAHLMLLERMPLTVNGKLDRQALPQPDAA
> SEQ ID NO: 224 - GlyD4
SRTTDAVSTIPLADRQQPLALSFAQERQWFLWQLEPESAAYHIPSALRLRGRLDVDALQRSFDSLVARHETLRTR
FRLEGGRSYOOVQPAVSVSIEREQFGEEGLIERIOAIVVQPFDLERGPLLRVNLLQLAEDDHVLVLVQHHIVSDG
WSMQVMVEELVQLYAAYSQGLDVVLPALPIQYADYALWQRSWMEAGEKERQLAYWTGLLGGEQPVLELPFDRPRP
ARQSHRGAQLGFELSRELVEAVRALAQREGASSFMLLLASFQALLYRYSGQADIRVGVPIANRNRVETERLIGFF
VNTQVLKADLDGRMGFDELLAQARQRALEAQAHQDLPFEQLVEALQPERNASHNPLFQVLFNHQSEIRSVTPEVQ
LEDLRLEGLAWDGQTAQFDLTLDIQEDENGIWASFDYATDLFDASTVERLAGHWRNLLRGIVANPRQRLGELPLL
DGAESRRMLVEWNDTREAYAADRRVHELFEAQAARTPDASAVESQGRALSYAELNRRANQLARHLRRMGVGPEVL
VGICVEKSVEMLVGLLGILKAGGAYVPLDPAFPAERLAFMAEDAELPVLLTESRLTAVVPPNPTRRTVLLDSDWE
LIAGESGDDLSDTGGGENTAYVIYTSGSTGRPKGVQVSHRALVNFLHSMRGRPGIEAGDTLLAVTTLSFDIAGLE
LYLPLLTGARVVVAGREELSDGALLSERISRSGATVMQATPATWRLLLGAGWRGKSDLRIFCGGEALARELANQL
LEKCAELWNLYGPTETTIWSAIHRVETTEGAVSVGRPIANTRVYVLDKNLRPVPAGVPGELLIGGDGLARGYLNR
PDLTAEKFVPDPFGDAPGARLYRTGDLARYQADGNIEYIGRIDHQVKVRGFRIELGEIEAALAGLAGVRDAVVLA
HDGVGGTQLVGYVVADSAEDAERLRESLRESLKRHLPDYMVPAHLMLLERMPLTVNGKLDRQALPQPDAA
> SEQ ID NO: 226 -GlyD5
SRTTDAVSTIPLADRQQPLALSFAQERQWFLWQLEPESAAYHIPSALRLRGRLDVDALQRSFDSLVARHETLRTR
FRLEGGRSYQQVQPAVSVSIEREQFGEEGLIERIQAIVVQPFDLERGPLLRVNLLQLAEDDHVLVLVQHHIVSDG
WSMQVMVEELVQLYAAYSQGLDVVLPALPIQYADYALWQRSWMEAGEKERQLAYWTGLLGGEQPVLELPFDRPRP
ARQSHRGAQLGFELSRELVEAVRALAQREGASSFMLLLASFQALLYRYSGQADIRVGVPIANRNRVETERLIGFF
VNTQVLKADLDGRMGFDELLAQARQRALEAQAHQDLPFEQLVEALQPERNASHNPLFQVLFNHQSEIRSVTPEVQ
LEDLRLEGLAWDGQTAQFDLTLDIQEDENGIWASFDYATDLFDASTVERLAGHWRNLLRGIVANPRQRLGELPLL
DGAESRRMLVEWNDTREAYAADRRVHELFEAQAARTPDASAVESQGRALSYAELNRRANQLARHLRRMGVGPEVL
VGICVEKSVEMLVGLLGILKAGGAYVPLDPAFPAERLAFMAEDAELPVLLTESRLTAVVPPNPTRRTVLLDSDWE
LIAGESGDDLSDTGGGENTAYVIYTSGSTGRPKGVQVSHRALVNFLHSMRGRPGIEAGDTLLAVTTLSFDIAGLE
LYLPLLTGARVVVAGREELSDGALLSERISRSGATVMQATPATWRLLLGAGWRGKSDLRIFCGGEALARELANQL
LEKCAELWNLYGPTETTIWSAIHRVETTEGAVSVGRPIANTRVYVLDKNLRPVPAGVPGELLIGGDGLARGYLNR
PDLTAEKFVPDPFGDAPGARLYRTGDLARYSPGGELEILNRIDHQVKVRGFRIELGEIEAALAGLAGVRDAVVLA
HDGVGGTQLVGYVVADSAEDAERLRESLRESLKRHLPDYMVPAHLMLLERMPLTVNGKLDRQALPQPDAA
> SEQ ID NO: 228 -GlyD6
SRTTDAVSTIPLADRQQPLALSFAQERQWFLWQLEPESAAYHIPSALRLRGRLDVDALQRSFDSLVARHETLRTR
FRLEGGRSYQQVQPAVSVSIEREQFGEEGLIERIQAIVVQPFDLERGPLLRVNLLQLAEDDHVLVLVQHHIVSDG
WSMQVMVEELVQLYAAYSQGLDVVLPALPIQYADYALWQRSWMEAGEKERQLAYWTGLLGGEQPVLELPFDRPRP
ARQSHRGAQLGFELSRELVEAVRALAQREGASSFMLLLASFQALLYRYSGQADIRVGVPIANRNRVETERLIGFF
VNTQVLKADLDGRMGFDELLAQARQRALEAQAHQDLPFEQLVEALQPERNASHNPLFQVLFNHQSEIRSVTPEVQ
LEDLRLEGLAWDGQTAQFDLTLDIQEDENGIWASFDYATDLFDASTVERLAGHWRNLLRGIVANPRQRLGELPLL
DGAESRRMLVEWNDTREAYAADRRVHELFEAQAARTPDASAVESQGRALSYAELNRRANQLARHLRRMGVGPEVL
VGICVEKSVEMLVGLLGILKAGGAYVPLDPAFPAERLAFMAEDAELPVLLTESRLTAVVPPNPTRRTVLLDSDWE
LIAGESGDDLSDTGGGENTAYVIYTSGSTGRPKGVQVSHRALVNFLHSMRGRPGIEAGDTLLAVTTLSFDIAGLE
LYLPLLTGARVVVAGREELSDGALLSERISRSGATVMQATPATWRLLLGAGWRGKSDLRIFCGGEALARELANQL
LEKCAELWNLYGPTETTIWSAIHRVETTEGAVSVGRPIANTRVYVLDKNLRPVPAGVPGELLIGGDGLARGYLNR
PDLTAEKFVPDPFGDAPGARLYRTGDLARYSPGGELEILNRVDTQVKVRGFRIELGEIEAALAGLAGVRDAVVLA
HDGVGGTQLVGYVVADSAEDAERLRESLRESLKRHLPDYMVPAHLMLLERMPLTVNGKLDRQALPQPDAA
> SEQ ID NO: 230 -GlyD7
SRTTDAVSTIPLADRQQPLALSFAQERQWFLWQLEPESAAYHIPSALRLRGRLDVDALQRSFDSLVARHETLRTR
FRLEGGRSYQQVQPAVSVSIEREQFGEEGLIERIQAIVVQPFDLERGPLLRVNLLQLAEDDHVLVLVQHHIVSDG
WSMQVMVEELVQLYAAYSQGLDVVLPALPIQYADYALWQRSWMEAGEKERQLAYWTGLLGGEQPVLELPFDRPRP
ARQSHRGAQLGFELSRELVEAVRALAQREGASSFMLLLASFQALLYRYSGQADIRVGVPIANRNRVETERLIGFF
VNTQVLKADLDGRMGFDELLAQARQRALEAQAHQDLPFEQLVEALQPERNASHNPLFQVLFNHQSEIRSVTPEVQ
LEDLRLEGLAWDGQTAQFDLTLDIQEDENGIWASFDYATDLFDASTVERLAGHWRNLLRGIVANPRQRLGELPLL
DGAESRRMLVEWNDTREAYAADRRVHELFEAQAARTPDASAVESQGRALSYAELNRRANQLARHLRRMGVGPEVL
VGICVEKSVEMLVGLLGILKAGGAYVPLDPAFPAERLAFMAEDAELPVLLTESRLTAVVPPNPTRRTVLLDSDWE
LIAGESGDDLSDTGGGENTAYVIYTSGSTGRPKGVQVSHRALVNFLHSMRGRPGIEAGDTLLAVTTLSFDIAGLE
LYLPLLTGARVVVAGREELSDGALLSERISRSGATVMQATPATWRLLLGAGWRGKSDLRIFCGGEALARELANQL
LEKCAELWNLYGPTETTIWSAIHRVETTEGAVSVGRPIANTRVYVLDKNLRPVPAGVPGELLIGGDGLARGYLNR
PDLTAEKFVPDPFGDAPGARLYRTGDLARYSPGGELEILNRVDTQVKIRGFRIEPGEIEAALAGLAGVRDAVVLA
HDGVGGTQLVGYVVADSAEDAERLRESLRESLKRHLPDYMVPAHLMLLERMPLTVNGKLDRQALPQPDAA
> SEQ ID NO: 232 -NZ_CP020028.1.cluster004_Leu_B
AYEQKTTLPKKEAAFAKAFQPTQYRFSLNRTLTKQLGTIASQNQVTLSTVIQTIWGVLLQKYNAAHDVLFGSVVS
GRPTDIVGIDKMVGLFINTIPFRVQAKAGQTFSELLQAVHKRTLQSQPYEHVPLYDIQTQSVLKQELIDHLLVIE
NYPLVEALQKKALNQQIGFTITAVEMFEPTNYDLTVMVMPKEELAFRFDYNAALFDEQVVQKLAGHLQQIADCVA
NNSGVELCQIPLLTEEGSLLLHDFNRTEAEYPKDQTINALFEERAEQRADHPALVWGEQTLTYRELNEQANRLAK
VLRARGVKADDIVAIMTERSMEMVIGILGTLKAGGAYLPIDPNYPEERIHYMLEDSGASMLLTQKHLRDKLTYHG
PIMDVDGEDLKHLELDGHANLQPANKPEDLAYIIYTSGSTGKPKGVMVEHRGIINLWHFFQEQWGVNGSDRMLQF
ASSSFDASVWEMFTILLGGGTLYLVSRDIINNLNEFARFVNENQITIALLPPTYLAGIEPEKLPALKKLVTGGSA
ITKELVTRWKDSVEYMNAYGPSESSVIATAWTYREEDMGYSSVPIGKPIANTRIYIMDEHQKLLPLGAAGEMCVA
GDGLARGYLHRPELTAEKFVVNPYEAGEKLYRTGDLVRWLPDGNIEFLGRIDDQVKIRGFRIELGEIEAQLQKHP
LVQEVAVIAREDKQKEKYLAAYITAEGEPEAEELREQLLQELPDYMVPSSFMQLEHMPMTPSGKIDRKALPEPEA
A
> SEQ ID NO: 234 -NZ_CP020028.1.cluster004_Leu_D
AYEQKTTLPKKEAAFAKAFQPTQYRFSLNRTLTKQLGTIASQNQVTLSTVIQTIWGVLLQKYNAAHDVLFGSVVS
GRPTDIVGIDKMVGLFINTIPFRVQAKAGQTFSELLQAVHKRTLQSQPYEHVPLYDIQTQSVLKQELIDHLLVIE
NYPLVEALQKKALNQQIGFTITAVEMFEPTNYDLTVMVMPKEELAFRFDYNAALFDEQVVQKLAGHLQQIADCVA
NNSGVELCQIPLLTEAETSQLLAKFNRTEAEYPKDQTINALFEERAEQRADHPALVWGEQTLTYRELNEQANRLA
KVLRARGVKADDIVAIMTERSMEMVIGILGTLKAGGAYLPIDPNYPEERIHYMLEDSGASMLLTQKHLRDKLTYH
GPIMDVDGEDLKHLELDGHANLQPANKPEDLAYIIYTSGSTGKPKGVMVEHRGIINLWHFFQEQWGVNGSDRMLQ
FASSSFDASVWEMFTILLGGGTLYLVSRDIINNLNEFARFVNENQITIALLPPTYLAGIEPEKLPALKKLVTGGS
AITKELVTRWKDSVEYMNAYGPSESSVIATAWTYREEDMGYSSVPIGKPIANTRIYIMDEHQKLLPLGAAGEMCV
AGDGLARGYLHRPELTAEKFVVNPYEAGEKLYRTGDLVRWLPDGNIEFLGRIDDQVKIRGFRIELGEIEAQLQKH
PLVQEVAVIAREDKQKEKYLAAYITAEGEPEAEELREQLLQELPDYMVPSSFMQLEHMPMTPSGKIDRKALPEPE
AA
> SEQ ID NO: 236 -TycC6 B
AYEQKTTLPKKEAAFAKAFQPTQYRFSLNRTLTKQLGTIASQNQVTLSTVIQTIWGVLLQKYNAAHDVLFGSVVS
GRPTDIVGIDKMVGLFINTIPFRVQAKAGQTFSELLQAVHKRTLQSQPYEHVPLYDIQTQSVLKQELIDHLLVIE
NYPLVEALQKKALNQQIGFTITAVEMFEPTNYDLTVMVMPKEELAFRFDYNAALFDEQVVQKLAGHLQQIADCVA
NNSGVELCQIPLLTPEEKQQILAGFNDTAVSYALDKTLHQLFEEQVDKTPDQAALLFSEQSLTYSELNERANRLA
RVLRAKGVGPDRLVAIMAERSPEMVIGILGILKAGGAYVPVDPGYPQERIQYLLEDSNAALLLSQAHLLPLLAQV
SSELPECLDLNAELDAGLSGSNLPAVNQPTDLAYVIYTSGTTGKPKGVMIPHQGIVNCLQWRRDEYGFGPSDKAL
QVFSFAFDGFVASLFAPLLGGATCVLPQEAAAKDPVALKKLMAATEVTHYYGVPSLFQAILDCSTTTDFNQLRCV
TLGGEKLPVQLVQKTKEKHPAIEINNEYGPTENSVVTTISRSIEAGQAITIGRPLANVQVYIVDEQHHLQPIGVV
GELCIGGAGLARGYLNKPELTAEKFVANPFRPGERMYKTGDLVKWRTDGTIEYIGRADEQVKVRGYRIEIGEIES
AVLAYQGIDQAVVVARDDDATAGSYLCAYFVAATAVSVSGLRSHLAKELPAYMIPSYFVELDQLPLSANGKVDRK
ALPKPQAA
> SEQ ID NO: 238 -TycC6_D
AYEQKTTLPKKEAAFAKAFQPTQYRFSLNRTLTKQLGTIASQNQVTLSTVIQTIWGVLLQKYNAAHDVLFGSVVS
GRPTDIVGIDKMVGLFINTIPFRVQAKAGQTFSELLQAVHKRTLQSQPYEHVPLYDIQTQSVLKQELIDHLLVIE
NYPLVEALQKKALNQQIGFTITAVEMFEPTNYDLTVMVMPKEELAFRFDYNAALFDEQVVQKLAGHLQQIADCVA
NNSGVELCQIPLLTEAETSQLLAKFNDTAVSYALDKTLHQLFEEQVDKTPDQAALLFSEQSLTYSELNERANRLA
RVLRAKGVGPDRLVAIMAERSPEMVIGILGILKAGGAYVPVDPGYPQERIQYLLEDSNAALLLSQAHLLPLLAQV
SSELPECLDLNAELDAGLSGSNLPAVNQPTDLAYVIYTSGTTGKPKGVMIPHQGIVNCLQWRRDEYGFGPSDKAL
QVFSFAFDGFVASLFAPLLGGATCVLPQEAAAKDPVALKKLMAATEVTHYYGVPSLFQAILDCSTTTDFNQLRCV
TLGGEKLPVQLVQKTKEKHPAIEINNEYGPTENSVVTTISRSIEAGQAITIGRPLANVQVYIVDEQHHLQPIGVV
GELCIGGAGLARGYLNKPELTAEKFVANPFRPGERMYKTGDLVKWRTDGTIEYIGRADEQVKVRGYRIEIGEIES
AVLAYQGIDQAVVVARDDDATAGSYLCAYFVAATAVSVSGLRSHLAKELPAYMIPSYFVELDQLPLSANGKVDRK
ALPKPQAA
> SEQ ID NO: 240 -SrfAC B
AYEQKTTLPKKEAAFAKAFQPTQYRFSLNRTLTKQLGTIASQNQVTLSTVIQTIWGVLLQKYNAAHDVLFGSVVS
GRPTDIVGIDKMVGLFINTIPFRVQAKAGQTFSELLQAVHKRTLQSQPYEHVPLYDIQTQSVLKQELIDHLLVIE
NYPLVEALQKKALNQQIGFTITAVEMFEPTNYDLTVMVMPKEELAFRFDYNAALFDEQVVQKLAGHLQQIADCVA
NNSGVELCQIPLLTDREREFLLTGLNPPAQAHETKPLTYWFKEAVNANPDAPALTYSGQTLSYRELDEEANRIAR
RLQKHGAGKGSVVALYTKRSLELVIGILGVLKAGAAYLPVDPKLPEDRISYMLADSAAACLLTHQEMKEQAAELP
YTGTTLFIDDQTRFEEQASDPATAIDPNDPAYIMYTSGTTGKPKGNITTHANIQGLVKHVDYMAFSDQDTFLSVS
NYAFDAFTFDFYASMLNAARLIIADEHTLLDTERLTDLILQENVNVMFATTALFNLLTDAGEDWMKGLRCILFGG
ERASVPHVRKALRIMGPGKLINCYGPTEGTVFATAHVVHDLPDSISSLPIGKPISNASVYILNEQSQLQPFGAVG
ELCISGMGVSKGYVNRADLTKEKFIENPFKPGETLYRTGDLARWLPDGTIEYAGRIDDQVKIRGHRIELEEIEKQ
LQEYPGVKDAVVVADRHESGDASINAYLVNRTQLSAEDVKAHLKKQLPAYMVPQTFTFLDELPLTTNGKVNKRLL
PKPDAA
> SEQ ID NO: 242 -SrfAC_D
AYEQKTTLPKKEAAFAKAFQPTQYRFSLNRTLTKQLGTIASQNQVTLSTVIQTIWGVLLQKYNAAHDVLFGSVVS
GRPTDIVGIDKMVGLFINTIPFRVQAKAGQTFSELLQAVHKRTLQSQPYEHVPLYDIQTQSVLKQELIDHLLVIE
NYPLVEALQKKALNQQIGFTITAVEMFEPTNYDLTVMVMPKEELAFRFDYNAALFDEQVVQKLAGHLQQIADCVA
NNSGVELCQIPLLTEAETSQLLAKLNPPAQAHETKPLTYWFKEAVNANPDAPALTYSGQTLSYRELDEEANRIAR
RLQKHGAGKGSVVALYTKRSLELVIGILGVLKAGAAYLPVDPKLPEDRISYMLADSAAACLLTHQEMKEQAAELP
YTGTTLFIDDQTRFEEQASDPATAIDPNDPAYIMYTSGTTGKPKGNITTHANIQGLVKHVDYMAFSDQDTFLSVS
NYAFDAFTFDFYASMLNAARLIIADEHTLLDTERLTDLILQENVNVMFATTALFNLLTDAGEDWMKGLRCILFGG
ERASVPHVRKALRIMGPGKLINCYGPTEGTVFATAHVVHDLPDSISSLPIGKPISNASVYILNEQSQLQPFGAVG
ELCISGMGVSKGYVNRADLTKEKFIENPFKPGETLYRTGDLARWLPDGTIEYAGRIDDQVKIRGHRIELEEIEKQ
LQEYPGVKDAVVVADRHESGDASINAYLVNRTQLSAEDVKAHLKKQLPAYMVPQTFTFLDELPLTTNGKVNKRLL
PKPDAA

[0165] The examples provided herein are provided for the purpose of illustrating specific embodiments and aspects of the invention and are not intended to limit the invention in any way. Persons of ordinary skill can utilise the disclosures and teachings herein to produce other embodiments, aspects, and variations without undue experimentation. All such embodiments, aspects, and variations are considered to be part of this invention.

### EXAMPLES

### Overview and Summary of Experimental Results

[0166] Non-ribosomal peptide synthetases (NRPS) are large modular enzymes that govern the synthesis of numerous biotechnologically relevant products. Their mode of action is frequently compared to an assembly line, in which each module acts in a semi-autonomous but coordinated manner to add a specific monomer to a growing peptide chain, unfettered by ribosomal constraints. The modular nature of these systems offers tantalising prospects for synthetic biology, wherein the assembly line is re-engineered at a genetic level to generate a specific or combinatorial modified product. However, although this has clearly been a primary mechanism of natural product diversification throughout evolution, equivalent strategies have proven challenging to implement in the laboratory.

[0167] A primary constraint has been the dogmatic assumption that there are two levels of “proof-reading” that govern the selection of an individual amino acid for incorporation into a peptide product. That is proof-reading that not only occurs during the initial selection of that amino acid by the adenylation (A) domain, but also during peptide bond formation, which is catalysed by an adjacent condensation (C) domain. As such, it has been broadly accepted that new products cannot be efficiently generated by substitution of A domains alone, and that the C domain must also be replaced to enable a new amino acid to be incorporated. As shown herein, the inventors have obtained surprising evidence that this is not the case, and that new products can efficiently be generated via a strategy of substituting A domains alone. In accordance with these results, successful recombination strategies and constructs are provided.

### Example 1: Vectors for Substitution of Domains into the Enzyme PvdD

[0168] The inventors' previous experiments involved the production of variants of the pvdD gene. The variants were constructed in plasmids and subsequently transformed into a pvdD deletion strain, i.e., a P. aeruginosa strain in which the native pvdD gene had been knocked out. The introduced variants of the pvdD gene were then tested for pyoverdine production when the complemented P. aeruginosa strain was grown in liquid media (Calcott et al. 2014; Calcott et al. 2015). In the current experiments, a series of plasmids were created to perform domain substitutions into PvdD. The plasmids were based on the plasmid pUCP22 with an inserted pBAD promoter, namely pUCP22:pBAD (SEQ ID NO: 3).

[0169] The plasmid pUCBAD-SMC (SEQ ID NO: 4) was created to express a pvdD gene lacking the C-A domains in module 2. This plasmid contains SpeI and NotI restriction sites to enable DNA sequences, encoding C-A domains, to be inserted using compatible XbaI and NotI sites. The plasmid pDEC-Lys (SEQ ID NO: 5) contains a copy of the pvdD gene lacking a C domain in module 2, in which the second A domain has been replaced with the Lys A domain from pvdJ. This plasmid contains SpeI and SalI restriction sites to enable DNA sequences, encoding C domains to be inserted, using compatible XbaI and XhoI sites.

[0170] The plasmid pDEC-Thr (SEQ ID NO: 6) contains a copy of the pvdD gene lacking a C domain in module 2. This plasmid contains SpeI and SalI restriction sites to enable DNA sequences, encoding C domains, to be inserted using compatible XbaI and XhoI sites. The plasmid pTRN (SEQ ID NO: 7) contains a copy of the pvdD gene lacking the 3′ portion of the C domain in module 2. This plasmid contains SpeI and SalI restriction sites to enable DNA sequences, encoding C domains, to be inserted using compatible SpeI and XhoI sites.

### Example 2: Analysis of Pyoverdine Production

[0171] As described previously, domains were introduced into the above-noted plasmids and tested using established methods for analysing pyoverdine production (Calcott et al. 2014; Calcott and Ackerley 2015; Owen et al. 2016). In brief, strains were grown in 200 μL of low salt LB in a 96 well plate. After 24 hours growth at 37° C., 10 μL of this starter culture was used to inoculate 190 μL of M9 media containing 0.1% (w/v) L-arabinose and 4 g/l succinate (pH 7.0). Cultures were grown for 37° C. for 24 hours, centrifuged to pellet bacteria, and then 100 μL of supernatant transferred to a fresh 96 well plate and diluted 2× in fresh M9 media to give a total volume of 200 μL. Absorbance (400 nm) was measured using an EnSpire 2300 Multilabel Reader (Perkin Elmer, Waltham, Mass., USA).

[0172] For mass spectrometry analysis, 1 μL of supernatant was mixed with 20 μL of matrix (500 μL acetonitrile, 500 μL ultrapure water, 1 μL trifluoroacetic acid, 10 μg α-Cyano-4-hydroxycinnamic acid). Aliquots of 0.5 μl were spotted in triplicate onto an Opti-TOF® 384 well MALDI plate (Applied Biosystems, Foster City, Calif.) and allowed to dry at room temperature. Spots were analysed using a MALDI TOF/TOF 5800 mass spectrometer (Applied Biosystems) in positive ion mode. Peaks were externally calibrated using cal2 calibration mixture (Applied Biosystems).

### Example 3: DNA Shuffling to Isolate Regions Involved in Substrate Specificity

[0173] The recombination sites for successful A domain substitution were identified during experiments that attempted to locate the binding site responsible for C domain specificity towards the acceptor substrate. In accordance with the accepted understanding in the field, it had been assumed that C domain specificity at the acceptor site had previously inhibited the production of modified pyoverdines using A domain substitution. To identify residues of NRPS enzymes involved in acceptor site substrate specificity, this experiment shuffled DNA sequences encoding the C domain from the Lys-specific module of PvdJ with the sequence encoding the C domain from the second (Thr-specific) module of PvdD. Based on amino acid sequence identity of the C domains, sequences encoding the Lys specific C domain and the Thr specific C domain were split into three regions (FIG. 2A). A homology model of the C domain from PvdD was created using Raptor X (Kallberg et al. 2012) and showed the three regions could be shuffled effectively with only a minimal number of new amino acid interactions introduced (FIG. 2B). Based on this, DNA shuffling was used to identify which region(s) would allow incorporation of lysine versus threonine into the pyoverdine peptide.

[0174] DNA encoding the Lys C domain (SEQ ID NO: 8) and Thr C domain (SEQ ID NO: 10) was generated, as well as DNA encoding the three regions recombined in the six possible combinations (SEQ ID NOs: 12, 14, 16, 18 20, 22). These constructs were restriction digested using XbaI and XhoI and ligated into the SpeI and SalI restriction sites of plasmid pDEC-Lys. When selecting recombination points for this experiment, the downstream point of recombination was located in close proximity to the A1 motif. This meant region 3 of the C domain was always substituted in association with the corresponding linker region, i.e., region 3 from the Thr specific module was always substituted along with the linker region from the Thr specific module and vice versa. This was believed unlikely to be a significant factor because there was no previous evidence that the linker region could be involved in acceptor site specificity.

[0175] When ligated upstream to the Lys specific A domain in the vector pDEC-Lys (FIG. 3A), it was reasoned that it would be possible to identify regions of the C domain involved with Lys specificity at the acceptor site. The reasoning for this being that only shuffled C domains containing a functional Lys specific acceptor site would produce functional NRPS enzymes. When transformed into the pvdD deletion strain and tested for pyoverdine production, it was found that all shuffled C domain sequences that contained region 3 from a Lys C domain, i.e., the 3′ end of the C domain, were functional with the Lys A domain, and these constructs produced high yields of pyoverdine (FIG. 3B). The pyoverdine was confirmed to contain a terminal Lys residue using MALDI-MS.

[0176] The next aim was to identify the precise residues within region 3 of the Lys module that allowed the recombinant C domains to receive Lys as an acceptor substrate. Inspection of the homology model of the C domain from PvdD identified no clear binding pocket formed by the residues differing between the Lys-specific C domain and Thr-specific C domain. To further narrow down the substrate specificity determining residues, it was decided to mutate the residues in region 3 that differed between the C domains and were closest to the catalytic histidine residue.

[0177] For this, the six or twelve residues were selected that were closest to the catalytic histidine residue as well as a large loop which flexes across the solvent channel of the C domain. These are shown in FIG. 4 as 6, 12, and loop, and the DNA encoding these sequences are SEQ ID NOs. 24, 26 and 28, respectively. These residues were targeted because it was reasoned their close proximity to the catalytic histidine residue meant they were the most likely residues to be involved in determining substrate specificity. However, all three altered C domains resulted in high yield production of pyoverdine when ligated upstream to a Thr C domain in the vector pTRN and transformed into a pvdD deletion strain. In contrast, when the C domains were subsequently ligated upstream to a Lys A domain in the vector pDEC-Lys and transformed into the pvdD deletion strain, there was no pyoverdine produced or very low levels when tested in liquid media.

[0178] As mutating the residues closest to the catalytic histidine or loop failed to switch acceptor site specificity, the mutagenesis of the third variable region was expanded. The mutations were introduced to generate substitutions of the six residues closest to the catalytic histidine in combination with mutating the loop (SEQ ID NO: 30), six residues closest to the catalytic histidine in combination with mutating the edges of the loop (SEQ ID NO: 32) and twelve residues closest to the catalytic histidine in combination with mutating the loop (SEQ ID NO: 34). These substitutions collectively targeted all the residues of region 3 that differed between the Thr and Lys C domains but left the linker region as being from the Thr C domain.

[0179] As discussed above, the substitutions were made under the assumption that the linker region was unimportant. To test this assumption, a negative control (SEQ ID NO: 36) was designated in which the region 3 of the C domain was unchanged from the Thr C domain but the linker region between the C-A domains was modified to be identical to the one from the Lys C-A domains. When the region 3 alterations were introduced into the vector pTRN and tested in the pvdD deletion strain, they all resulted in high yields of pyoverdine with the exception of the negative control (FIG. 4B). The high yield of pyoverdine when mutating the C domain and loss of function by merely changing the linker region was inconsistent with our assumption that the linker was unlikely to be a significant factor. Instead, this suggested the linker region was a key region in functionality. When the C domains were transferred from the vector pTRN to be upstream to a Lys specific A domain in the vector pDEC-Lys, the results were reversed (FIG. 4B), i.e., the entire Thr C domain combined with only the Lys linker region resulted in high yield production of pyoverdine. The incorporation of Lys into the terminal position of pyoverdine was confirmed by MALDI-MS.

[0180] These results were surprising as the Thr C domain being functional with the linker and A domain from a Lys specific module was contrary to the prevailing expectation in the field that C domains play critical roles in acceptor substrate selectivity, and to the expectation that C domain acceptor site specificity had previously caused A domain substitution to be unsuccessful.

### Example 4: Comparison of a Domain Substitutions to C-A Domain Substitutions

[0181] The inventors' previous attempts at creating modified pyoverdines were successful when C-A domain substitutions were performed. For this, it was possible to achieve a 3/10 success rate for C-A domain substitutions; however, two of these had relatively low yields of modified pyoverdine (Ackerley and Lamont, 2004; Calcott et al. 2014, Calcott et al. 2015). In light of the current experimental evidence showing that the Lys A domain could be functionally substituted along with the corresponding linker region, it was reasoned the C domain within module 2 of PvdD may exhibit relaxed specificity and therefore other substitutions could be successful. This experiment compared the yield of pyoverdine for our three previously successful C-A domain substitutions to substituting the linker and A domain together.

[0182] C-A domain substitutions from Lys, Ser and fhOrn specifying modules were introduced into PvdD by restriction digest of DNA encoded by the nucleotide sequences of SEQ ID NOs: 36, 40, 42 using the enzymes XbaI and NotI and ligation into the plasmid pUCBAD-SMC. The genetic regions encoding the linker plus A domain substitutions from Lys, Ser and fhOrn specifying modules were introduced into pvdD by restriction digest of the SEQ ID NOs: 44, 46, 48 using SpeI and XhoI and ligation into the plasmid pTRN. The resulting plasmids were introduced into the pvdD deletion strain and tested for pyoverdine production in liquid media (FIG. 5). In each case the yield of modified pyoverdine produced by the new substitution containing the linker plus A domain was either equal to the C-A domain substitution or greatly increased. This confirmed that not only can substitution of an A domain without a C domain be functional, but that it can result in improved activity compared to C-A domain substitutions.

### Example 5: Performing Additional a Domain Substitutions to Create Modified Pyoverdines

[0183] The above-noted experiments demonstrated that substitution of the linker plus A domain increased yield relative to previously successful C-A domain substitutions. To test whether other substitutions could be successful, A domains were selected from 9 modules predicted to activate substrates other than Thr (Table 1). To substitute the linker plus A domain from each of these modules into PvdD, the DNA sequences according to SEQ ID NOs: 52, 54, 56, 58, 60, 62, 64, 66 were synthesised, digested with SpeI and XhoI and ligated into the vector pTRN. When transformed into the pvdD deletion strain, 6/9 of the A domain substitutions yielded modified pyoverdines produced at high yield (FIG. 6). The success rate and yield were both much higher than observed previously using C-A domain substitutions.

TABLE 1
Substrate specificity predictions of A domains substituted into PvdD

| | Specificity predictions from the AntiSMASH | | | | | | |
|---|---|---|---|---|---|---|---|
| | database | | | | | Amino acid identity | |
| | NRPS Predictor2 | Stachelhaus | | | | to Pa11-Thr (%)** | |
| | SVM | code | Minowa | Consensus | Cluster name* | C domain | A domain |
| 1 | ala | ala | ala | ala | CP008696.1.cluster009_CA1 | 66.57 | 51.32 |
| 2 | ser | ser | ser | ser | CP006852.1.cluster006_CA4 | 72.24 | 50.54 |
| 3 | gly | gly | gly | gly | CP011507.1.cluster002_CA1 | 71.94 | 47.58 |
| 4 | hydrophilic | orn | orn | orn | CP003041.1.cluster006_CA2 | 73.43 | 47.01 |
| 5 | ser | ser | ser | ser | AP013068.1.cluster003_CA1 | 58.51 | 50.64 |
| 6 | glu | glu | ser | glu | CP010945.1.cluster006_CA1 | 53.61 | 48.39 |
| 7 | asp, asn, glu, gln, aad | asp | orn | nrp | AM181176.4.cluster005_CA2 | 42.99 | 43.98 |
| 8 | hydrophilic | trp | orn | nrp | CP000680.1.cluster003_CA3 | 53.13 | 47.39 |
| 9 | asp | asn | asp | asp | CP011972.1.cluster002_CA4 | 53.73 | 39.48 |

Shown are the name of each cluster and amino acid identity of C- and A domains to the corresponding domains from module Pa11-Thr.
*Domains were named according to the cluster name from the AntiSMASH database (Blin et al. 2017), and a number based on the order the CA domains appeared in the GBK file.
**C domains were trimmed to the C1 and C7 motifs, and A domains were trimmed to the A1 and A10 motifs inclusive. Domains were aligned using MUSCLE, and the resulting alignment used to calculate percent identity to the corresponding sequence from module 2 of PvdD.

### Example 6: Analysis of Natural Domain Substitution in Pyoverdine Biosynthesis

[0184] That the A domain substitutions were greatly improved over the corresponding C-A domain substitutions was surprising and suggested that A domain substitution may be applicable to engineering other NRPS pathways. However, the tight acceptor site specificity originally suggested in the work of Belshaw et al (1999) indicated it may not be feasible for A domain substitution to be performed downstream to C domains with tight specificity.

[0185] To identify how transferrable the results may be to other NRPS pathways, evolutionary evidence was assessed. Tight acceptor site specificity suggests C- and A domains co-evolve, and it was reasoned that if C domain acceptor site specificity is frequently relaxed then there should be evidence of A domain substitution occurring in nature. To begin with, identification was sought for putative A domain substitution events in the evolution of four pyoverdines (FIG. 7). Distinct maximum likelihood phylogenetic trees were constructed based on the C- and A domains from NRPS enzymes involved in their biosynthesis (FIG. 8). It was reasoned that modules within a single pathway that specify the same substrate, labelled A to J in FIG. 7, may be the result of domain substitution. Besides the instances labelled C, D and I, the C domains from potential domain substitution events were not closely related (FIG. 8A).

[0186] The most pronounced cases of this were instances B, E, F and H, in which one module contained a D-amino acid specific C domain and the second contained an L-amino acid specific C domain. In contrast to the phylogenetic tree of C domains, it was found that A domains cluster strongly by substrate specificity (FIG. 8B). Moreover, the A domains from putative domain substitution events were generally closely related to each other. The close relationship between A domains encoding the same substrates and the phylogenetic inconsistencies between C- and A domains provides evidence that A domain substitution has been a driver in the diversification of these pyoverdine biosynthetic pathways.

### Example 7: Evolution of NRPS Diversity in Pseudomonas, Streptomyces and Bacillus Genera

[0187] To provide a more global analysis of whether C- and A domains evolve independently, sequences of NRPS domains were analysed from three genera. The sequences for all NRPS gene clusters from the antiSMASH database (Blin et al. 2017) for the genera Pseudomonas, Streptomyces and Bacillus were downloaded. DNA sequences encoding ^{L}C_{L}-A-PCP tridomains were extracted and clustered at 95% identity. A codon-alignment of the centroid nucleotide sequence from each cluster was generated using MUSCLE (Edgar, 2004). Regions of ambiguous alignment were removed using GBLOCK version 0.91b (Castresana, 2000). The default parameters were used for GBLOCK except the minimum number of sequences for a flank position was set equal to 50% of the total sequences, the minimum length of a block was 5, and gap positions were allowed in half of the sequences. This resulted in three alignments, having a total of 528, 465 and 331 sequences for Pseudomonas, Bacillus and Streptomyces species, respectively.

[0188] To identify regions where recombination events had likely frequently occurred, the alignments were first analysed using TreeOrderScan (Simmonds, 2006; Simmonds, 2012). Sequences were grouped by the antiSMASH consensus prediction of A domain substrate specificity, and any groups of only a single sequence were removed. Next the nucleotide alignments were split into subalignments of 400 bp at 50 bp intervals and phylogenetic incompatibility matrices created. This found regions of increased phylogenetic incompatibility between A domains and the surrounding domains (FIG. 9A). Segregation analysis of the 400 bp subalignments found this region to be associated with increased clustering according to substrate specificity (FIG. 9B).

[0189] Following analysis with TreeOrderScan, recombination analysis of the sequences was performed using RDP4 (Martin et al. 2015), which uses multiple tools to identify putative regions at which DNA sequences have recombined. Default settings were used except sequences were specified as linear, only recombination events detected by at least three methods were considered and alignment consistency was unchecked. A breakpoint distribution plot was created using a 200 bp window and 1,000 permutations. The breakpoint distribution plot identified recombination hotspots located between the C- and A domain, upstream to the A domain binding pocket between the A2 and A4 motifs, and downstream to the binding pocket starting from close to the A5 motif (FIG. 9C).

[0190] The recombination hotspot analysis found the largest hotspots to be immediately on each side of the binding pocket, and the region between these hotspots corresponded to the region found to be most strongly segregate by substrate specificity when analysed with TreeOrderScan (FIG. 9A; FIG. 9B). In previous work, our A domain substitutions used recombination points located close to the A1 and A10 motifs. The recombination analysis found the A10 motif to be located within a local recombination hotspot, however the A1 motif was located within a trough between two hotspots. In contrast, the upstream location for recombination used for our successful Lys A domain substitution (labelled X) was centred on a local recombination hotspot; indicating increase levels of recombination in nature at this point. The similar results for Pseudomonas, Bacillus and Streptomyces species are inconsistent with the hypothesis that barriers to A domain substitution cause C- and A domains to co-evolve, and demonstrates that A domain and subdomain substitution have played a role in diversifying NRPS pathways in nature.

### Example 8: Testing A Domain Substitution Versus Partial A Domain Substitution

[0191] The above experiment shows A domain substitution occurs in nature, and one of the most striking results was that partial A domain substitution, i.e. substitution of only a region between the A2 and A6 motifs, is particularly favoured in natural evolution. This suggested that partial A domain substitution may be more favourable than substituting the linker and A domain together. To test this, DNA encoding the Ser specific A domain was used (labelled 2 in Table 1) and DNA encoding the Lys specific A domain from PvdJ was used. These two A domains had been shown to function in PvdD in the above experiments, and this experiment aimed to determine whether partial A domain substitution could produce similar yields of modified pyoverdine.

[0192] In initial testing, recombination points were selected for partial A domain substitution that were close to the peak of the recombination hotspots identified in FIG. 10. The sequences of SEQ ID NOs: 68 and 70 were for the partial A domain substitution from the Ser and Lys specific A domain. The DNA encoding these sequences was digested with SpeI and XhoI and ligated into pTRN. When transformed into the pvdD deletion strain and tested for pyoverdine production in liquid media, these substitutions resulted in no or very low levels of pyoverdine (FIG. 11A, sample 1). Based on these A domains having been shown to function in pvdD and the evidence of natural recombination occurring most frequently at these points, it was unexpected for pyoverdine production to be so strongly reduced relative to the linker plus A domain substitutions.

[0193] To understand why the initial attempt at partial A domain substitution was unsuccessful, the tool SCHEMA (Voigt et al. 2002) was used to analyse the number of perturbations introduced by recombination at each point along C-A domain pairs. Analysis was based on the structure 2VSQ as it was identified as the top template for modelling the C-A domains from the second module of PvdD using the Swiss-Model server (Waterhouse et al. 2018). Sequences were aligned with MUSCLE and then a contact map created with SCHEMA. A python script was then used to calculate the number of clashes using SCHEMA for each potential recombination point between the C-A domains of PvdD and the modules used as a source of A domains in Table 1. A bar graph for single recombination points was generated showing the average number of perturbations per recombination point (FIG. 11B). This showed the upstream recombination point used for our initial partial A domain substitutions (labelled substitution 1 in FIG. 11B) was within a region that introduces a large number of perturbations into the enzyme. In contrast, the site used for successful linker plus A domain substitution was found to be in a structurally favoured position.

[0194] Given the discrepancy between recombination hotspots in nature and lack of success for partial A domain substitution, five additional partial A domain substitutions were assessed for both the Ser and Lys specific A domains. The nucleotide sequences of SEQ ID NOs: 72, 74, 76, 78, 80, 82, 84, 86, 88, 90 were generated, digested with SpeI and XhoI and ligated into pTRN. The approximate regions that were substituted are labelled 2 to 6 in FIG. 11B, and were designed to test the optimal upstream recombination points based on our SCHEMA analysis. When the constructs were transformed into the pvdD deletion strain and tested for function, none produced high yields of modified pyoverdines (FIG. 11B). This result showed that substituting the linker plus A domain can result in higher yields of pyoverdine than partial A domain substitution, and that the upstream recombination point for partial A domain substitution may be structurally unfavourable. It may be that the partial A domain recombination that appears to occur with a high degree of frequency in nature reflects a high likelihood of crossover occurring at these locations, however a low proportion of successful outcomes, and hence this strategy may be unsuitable for laboratory-based recombination studies, where a relatively high success rate is required given the impracticality of generating large numbers of artificial constructs with existing methods.

### Example 9: Further Defining the Optimal Regions for Recombination Between C- and a Domains

[0195] As the current experiments identified an upstream recombination point that allows successful A domain substitution, the next aim was to test the flexibility in location for placing this recombination point. Whilst keeping the downstream recombination point constant, domain substitutions were performed in which the upstream recombination point was located at four additional locations (FIG. 12A). To create the substitutions, the DNA sequences of SEQ ID NOs: 92, 94, 96, 98, 100, 102, 104, 106, and 141, 143, 145, 147, 149, 151, 153, 155, 157, 159, 161, 163 were digested with XbaI and NotI then ligated into the plasmid pUCBAD-SMC. The plasmids were transformed into the pvdD deletion strain and tested for pyoverdine production in liquid media (FIG. 12B).

[0196] Compared with the corresponding Ser and fhOrn C-A domain substitutions created in experiment 3 and Gly and Phe C-A domain substitutions in this experiment, all the A domain recombination points resulted in significantly increased yield of pyoverdine for the substitutions from the Ser-specific module. In addition, the sites ‘X’ and ‘B’ resulted in increased pyoverdine yield for substitutions from the fhOrn-specific module and sites ‘B’ and ‘C’ resulted in an increase for substitutions from the Gly-specifying module. These results show that the upstream recombination site can be varied and still result in high yields of modified pyoverdines.

### Example 10: Demonstration of the Recombination Principles in a Second System: Creation of Dipeptides by a Domain Substitution

[0197] The experimental data provided herein demonstrates that A domain substitution can be utilised for modifying pyoverdine, and further, that this can be used to produce greatly increased yield and success rates relative to C-A domain substitution or partial A domain substitution.

[0198] The phylogenetic and recombination analysis suggested A domain substitution frequently occurs in nature and therefore the results should be transferable to other NRPS pathways. However, the tight acceptor site substrate specificity originally shown using in vitro assays by Belshaw et al (1999) was contrary to this and suggested some C domains may not allow A domain substitutions to be performed. Two assumptions were made in the study by Belshaw et al. namely: (i) that tethering the substrate to the T domain of Pro-CAT bypasses the A domain; an assumption that could be incorrect if, for instance, the binding of a substrate in the A domain binding pocket is a key step in controlling the direction of biosynthesis and required prior to condensation, and (ii) that the reduced catalytic rates observed in vitro were relevant in the in vivo context.

[0199] Taking into account these assumptions as well as the inventor's experiments indicating C domain specificity may not be as stringent as previously believed, experiments were carried out to test the transferability of the current methods using the same NRPS system as Belshaw et al. If either of the Belshaw et al assumptions were incorrect, then it was to be taken that A domain substitution would be broadly applicable to other NRPS pathways including the NRPS system of Belshaw et al that was originally used to infer stringent C domain specificity.

[0200] The Phe-ATE/Pro-CAT NRPS system originally used by Belshaw et al comprises the first two modules from the NRPS pathway involved in the biosynthesis of tyrocidine in B. brevis (Belshaw et al. 1999). This two-enzyme system was used to infer stringent acceptor site specificity of the C domain within Pro-CAT that precluded incorporation of L-Leu and L-Phe substrates (Belshaw et al. 1999). An A domain substitution plasmid was made based on pET28a containing the C domain from Pro-CAT, restriction sites to insert alternative A domains, and the T-Te domains from SrfAC (SEQ ID NO: 108). The Te-domain from SrfAC was used as it has previous been shown to enable release of linear peptides from Pro-CAT (Belshaw et al. 1999). The Pro specific A domain from Pro-CAT and five additional A domains were selected to insert into the A domain substitution construct. The five additional domains are represented by SEQ ID NOs: 109, 111, 113, 115, 117, 119, and included the Leu specific A domain from SrfAC, three additional Leu specific A domains and a Phe specific A domain. The A domain from SrfAC was of particular interest because the crystal structure of this module has been used to suggest that C-A domains form a tight interface which may prohibit A domain substitution (Tanovic et al. 2008).

[0201] The A domains exhibited low sequence identity to the A domain from Pro-CAT, ranging from 40.4% to 47.6% amino acid identity (Table 2). As such this experiment tests the main features that have been understood as prohibiting A domain substitution. In particular, it was assessed whether it was possible to use the C domain that was originally concluded to show tight acceptor site specificity and the A domain showing C- and A domains form a tight interface, and to substitute A domains that exhibited low sequence identity. These experiments were considered to be a good test of the limits of A domain substitution according to the disclosed methods, as according to the conventional understanding in the field, it should not have been possible to use the described approach to generate novel products.

TABLE 2
Substrate specificity predictions of A domains substituted into ProCAT

| | | | Amino acid identity to | |
|---|---|---|---|---|
| | Specificity predictions | | Pa11-Thr (%)** | |
| | using Stachelhaus code | Cluster name* | C domain | A domain |
| 2 | Leu | TycC6_Leu | 22.98 | 43.11 |
| 3 | Leu | SrfAC_Leu | 44.08 | 40.35 |
| 4 | Phe | NZ_CP021920.1.cluster002_Phe_CA3 | 22.98 | 46.33 |
| 5 | Leu | NZ_CP020028.1.cluster004_Leu_CA1 | 43.07 | 47.02 |
| 6 | Leu | NZ_CM000756.1.cluster012_Leu_CA1 | 21.82 | 47.64 |

Shown are the name of each cluster, and amino acid identity of C and A domains to the corresponding domains from ProCAT.
*Domains were named according to the cluster name from the AntiSMASH database (Blin et al. 2017).
**C domains were trimmed to the C1 and C7 motifs, and A domains were trimmed to the A1 and A10 motifs inclusive. Domains were aligned using muscle, and the resulting alignment used to calculate percent identity to the corresponding sequence from ProCAT.

[0202] The DNA sequences of SEQ ID NOs: 109, 111, 113, 115, 117, 119, were digested using NheI and NotI, then ligated into the compatible SpeI and NotI restriction sites of the vector pET28:ProC-TTe (SEQ ID NO: 108). The resulting Pro-CATTe constructs were transformed into a BAP1 strain of E. coli (Pfeifer et al. 2001) along with a second plasmid containing Phe-ATE (SEQ ID NO: 121). The strains were grown for 24 hours in 10 mL of M9, extracted and analysed using established protocols (Gruenewald et al. 2004). The production of dipeptides was quantified using HPLC and absorbance at 214 nm (FIG. 13), and confirmed using mass spectrometry. This found that the control Pro A domain substitution strain synthesised D-Phe-L-Pro DKP at 7.8 mg/L. This compares favourably to previous reports (Gruenewald et al. 2004).

[0203] Dipeptide production was able to be quantified for three of the Leu A domain substitutions and these ranged from 1.81 mg/L to 3.06 mg/L, i.e. only a slight reduction in product yield relative to the control, indicating relatively effective substitutions. The strain containing the A domain from SrfAC was the A domain having the lowest sequence identity to the A domain from Pro-CAT, and was found to produce D-Phe-L-Leu at 1.81 mg/L. The most functional A domain substitution contained the A domain from TycC6 and produced 3.06 mg/L of D-Phe-L-Leu. This A domain had the second lowest sequence identity to the A domain from ProCAT, showing being closely related to the original A domain is not essential for activity. Overall, the 3/5 success rate and high yield of dipeptides shows that, surprisingly, acceptor site specificity within the Phe-ATE/Pro-CAT NRPS system is not a barrier to using A domain substitution for the in vivo production of alternative peptides.

[0204] In summary, the current experiments provide compelling evidence that the C domain proofreading hypothesis stated by Belshaw et al 1999 and Ehmann et al 2000 is not a barrier to successful domain substitution. As shown herein, it has been demonstrated that novel non-ribosomal peptides can be generated with high success rates and fermentation yields that are frequently close to those of the native products, via A domain substitution. In relation to this is the identification of novel recombination boundaries that minimise the number of steric clashes and other incompatibilities with nearby residues. Prior to the experimental evidence provided herein, it had only been possible to generate functional recombinant pyoverdine NRPS enzymes when using A domains that activate the same amino acid, i.e., “synonymous” A domains that do not make any change to the final non-ribosomal peptide. Attempts by other researchers at producing altered peptides by A domain substitution have typically included the complete T domain or part of the T domain, and either only worked in vitro or else produced compounds at low yields (i.e., at only a few percent relative to the unmodified NRPS) in vivo that any modified compounds could only be detected by extremely sensitive techniques such as mass spectrometry. The disclosed enzymes and methods provide a substantial improvement on previous efforts.

### Example 11: Additional Testing of the X, B and D Recombination Sites

[0205] Assessment of the recombination sites tested in Example 9 identified the region stretching from recombination sites ‘X’ to ‘D’ as being the most amenable sites for substitution, with ‘X’, ‘B’ and ‘D’ each generating modified pyoverdine in three out of four cases, and ‘C’ in two out of four cases. To further assess the suitability of these sites for domain substitution, four additional A domains were selected and substituted into PvdD using the recombination sites ‘X’, ‘B’ and ‘D’. The four additional domains are represented by SEQ IDs Nos: 165, 167, 169, 171, 173, 175, 177, 179, 181, 183, 185, 187 and include an Ala, a Glu and two Arg specifying domains, referred to here as Arg1 and Arg2. To create these substitutions, the DNA sequences of SEQ ID NOs: 165, 167, 169, 171, 173, 175, 177, 179, 181, 183, 185, 187 were digested with XbaI and NotI and ligated into the plasmid pUCBAD-SMC. The plasmids were transformed into the pvdD deletion strain and tested for pyoverdine production in liquid media (FIG. 14). Of the three recombination sites tested, the ‘B’ site consistently resulted in the highest yields of modified pyoverdine for each A-domain substitution.

[0206] That substitutions using the ‘B’ site resulted in improved yield in the pvdD system suggested production of dipeptides in the PheATE-ProCATTe system could also be improved using the ‘B’ recombination site. To confirm the utility of the ‘X’, ‘B’ and ‘D’ recombination sites, and compare the relevant dipeptide yields generated by using each site, substitutions were made using the PheATE/ProCATTe system from Example 10. The three Leu-specifying A domains that previously generated a D-Phe-L-Leu dipeptide product when substituted at the ‘X’ site (FIG. 13D) were selected for additional testing at the ‘B’ and ‘D’ sites. The three Leu specifying A-domains included the A-domain from SrfAC, the A-domain from TycC module 6 and the A-domain from NZ_CP020028.1.cluster004 and are represented by SEQ ID NOs:231, 233, 235, 237, 239, 241.

[0207] The DNA sequences of SEQ ID NOs: 231, 233, 235, 237, 239, 241 were digested with the restriction enzymes HindIII and NotI, then ligated into the compatible HindIII and NotI restriction sites of the vector pET28:ProC-TTe (SEQ ID NO: 108). The resulting Pro-CATTe constructs were transformed into a BAP1 strain of E. coli (Pfeifer et al. 2001) along with a second plasmid containing Phe-ATE (SEQ ID NO: 121). The strains were grown for 24 hours at 30° C. in 5 mL of M9 medium, extracted, and the relative levels of dipeptide production analysed using established protocols (Gruenewald et al. 2004), i.e. production of dipeptides was quantified using HPLC and absorbance at 214 nm (FIG. 15). All variants produced the D-Phe-L-Leu dipeptide product, and the ‘B’ site was identified as the preferred site based on improved yield relative to the ‘X’ site and having the highest yield in 2/3 of the cases tested.

### Example 12: Testing the Effects of Modifying Downstream Recombination Sites

[0208] The above experiments used a downstream recombination site close to the A10 motif of the A domain. To test the tolerance of the downstream recombination sites, the downstream recombination site used for A domain substitution was modified while keeping the upstream ‘B’ site constant. The modules specifying Ser, fhOrn and Gly from Example 9 were chosen and a total of seven additional locations were selected to test the downstream recombination sites (FIG. 16A). To create substitutions, the DNA sequences of SEQ ID NOs: 189, 191, 193, 195, 197, 199, 200, 201, 203, 205, 207, 209, 211, 213, 215, 217, 219, 221, 223, 225, 227, 229 were digested with XbaI and NotI and ligated into the plasmid pUCBAD-SMC. The plasmids were transformed into the pvdD deletion strain and tested for pyoverdine production in liquid media (FIG. 16B). It was observed that altering the downstream recombination site resulted in successful production of modified pyoverdines for 13/24 substitutions, and that the ‘D7’ and ‘A10’ sites were the most optimal downstream recombination sites, each enabling production of modified pyoverdines in 3/3 cases tested.

### REFERENCES

[0209] Ackerley D F, Lamont I L (2004) Characterization and genetic manipulation of peptide synthetases in Pseudomonas aeruginosa PAO1 in order to generate novel pyoverdines. Chem Biol 11:971-980.
[0210] Baltz R H (2011) Function of MbtH homologs in nonribosomal peptide biosynthesis and applications in secondary metabolite discovery. J Ind Microbiol Biotechnol 38:1747-1760.
[0211] Baltz R H (2014) Combinatorial biosynthesis of cyclic lipopeptide antibiotics: a model for synthetic biology to accelerate the evolution of secondary metabolite biosynthetic pathways. ACS Synth Biol 3:748-758.
[0212] Baltz R H (2018) Synthetic biology, genome mining, and combinatorial biosynthesis of NRPS-derived antibiotics: a perspective. J Ind Microbiol Biotechnol 45:635-649.
[0213] Belshaw P J, Walsh C T, Stachelhaus T (1999) Aminoacyl-CoAs as probes of condensation domain selectivity in nonribosomal peptide synthesis. Science 284:486-489.
[0214] Bloudoff K, Alonzo D A, Schmeing T M (2016) Chemical probes allow structural insight into the condensation reaction of nonribosomal peptide synthetases. Cell Chem Biol 23:331-339.
[0215] Bloudoff K, Schmeing T M (2017) Structural and functional aspects of the nonribosomal peptide synthetase condensation domain superfamily: discovery, dissection and diversity. BBA—Proteins and Proteomics 1865 (2017) 1587-1604
[0216] Blin K, Medema M H, Kottmann R, Lee S Y, Weber T. (2017). The antiSMASH database, a comprehensive database of microbial secondary metabolite biosynthetic gene clusters. Nucleic Acids Res, 45, D555-D559.
[0217] Bozhüyük K A J, Fleischhacker F, Linck A, Wesche F, Tietze A, Niesert C P, Bode H B (2018) De novo design and engineering of non-ribosomal peptide synthetases. Nat Chem 10:275-281.
[0218] Bozhüyük K A J, Linck A, Tietze A, Kranz J, Wesche F, Nowak S, Fleischhacker F, Shi Y N, Grün P, Bode H B (2019) Modification and de novo design of non-ribosomal peptide synthetases using specific assembly points within condensation domains. Nat Chem 11:653-661.
[0219] Brown A S, Calcott M J, Owen J G, Ackerley D F (2018) Structural, functional and evolutionary perspectives on effective re-engineering of non-ribosomal peptide synthetase assembly lines. Nat Prod Rep 35:1210-1228.
[0220] Bush K (2012) Improving known classes of antibiotics: an optimistic approach for the future. Curr Opin Pharmacol 12:527-534.
[0221] Caboche S, Leclère V, Pupin M, et al. (2010) Diversity of monomers in nonribosomal peptides: towards the prediction of origin and biological activity. J Bacteriol 192:5143-5150.
[0222] Calcott M J, Owen J G, Lamont I L, Ackerley D F (2014) Biosynthesis of novel pyoverdines by domain substitution in a nonribosomal peptide synthetase of Pseudomonas aeruginosa. Appl Environ Microbiol 80:5723-5731.
[0223] Calcott M J, Ackerley D F (2015) Portability of the thiolation domain in recombinant pyoverdine non-ribosomal peptide synthetases. BMC Microbiol 15:162.
[0224] Caradec T, Pupin M, Vanvlassenbroeck A, et al. (2014) Prediction of monomer isomery in florine: a workflow dedicated to nonribosomal peptide discovery. PLoS ONE 9:e85667.
[0225] Castresana J. (2000) Selection of conserved blocks from multiple alignments for their use in phylogenetic analysis. Molecular Biology and Evolution. 17:540-552.
[0226] Chen C-Y, Georgiev I, Anderson A C, Donald B R (2009) Computational structure-based redesign of enzyme activity. Proc Natl Acad Sci USA 106:3764-3769.
[0227] Chiocchini C, Linne U, Stachelhaus T (2006) In vivo biocombinatorial synthesis of lipopeptides by com domain-mediated reprogramming of the surfactin biosynthetic complex. Chem Biol 13:899-908.
[0228] Crusemann M, Kohlhaas C, Piel J (2013) Evolution-guided engineering of nonribosomal peptide synthetase adenylation domains. Chem Sci 4:1041-1045.
[0229] Doekel S, Marahiel M A (2000) Dipeptide formation on engineered hybrid peptide synthetases. Chem Biol 7:373-384.
[0230] Doekel S, Coëffet-Le Gal M F, Gu J Q, Chu M, Baltz R H, Brian P. 2008. Non-ribosomal peptide synthetase module fusions to produce derivatives of daptomycin in Streptomyces roseosporus. Microbiology 154:2872-2880.
[0231] Duerfahrt T, Doekel S, Sonke T, et al. (2003) Construction of hybrid peptide synthetases for the production of α-l-aspartyl-l-phenylalanine, a precursor for the high-intensity sweetener aspartame. Eur J Biochem 270:4555-4563.
[0232] Edgar R C (2004) MUSCLE: a multiple sequence alignment method with reduced time and space complexity. BMC Bioinformatics 5:113.
[0233] Ehmann D E, Trauger J W, Stachelhaus T, Walsh C T (2000) Aminoacyl-SNACs as small-molecule substrates for the condensation domains of nonribosomal peptide synthetases. Chem Biol 7:765-772.
[0234] Eppelmann K, Stachelhaus T, Marahiel M A (2002) Exploitation of the Selectivity-Conferring Code of Nonribosomal Peptide Synthetases for the Rational Design of Novel Peptide Antibiotics. Biochemistry 41:9718-9726.
[0235] Felnagle E A, Jackson E E, Chan Y A, et al. (2008) Nonribosomal peptide synthetases involved in the production of medically relevant natural products. Mol Pharm 5:191-211.
[0236] Fischbach M A, Lai J R, Roche E D, et al. (2007) Directed evolution can rapidly improve the activity of chimeric assembly-line enzymes. Proc Natl Acad Sci USA 104:11951-11956.
[0237] Fischbach M A, Walsh C T, Clardy J (2008) The evolution of gene collectives: How natural selection drives chemical innovation. Proc Natl Acad Sci USA 105:4601-4608.
[0238] Gruenewald S, Mootz H D, Stehmeier P, Stachelhaus T (2004) In vivo production of artificial nonribosomal peptide products in the heterologous host Escherichia coli. Appl Environ Microbiol 70:3282-3291.
[0239] Hahn M, Stachelhaus T (2004) Selective interaction between nonribosomal peptide synthetases is facilitated by short communication-mediating domains. Proc Natl Acad Sci USA 101:15585-15590.
[0240] Hur G H, Vickery C R, Burkart M D (2012) Explorations of catalytic domains in non-ribosomal peptide synthetase enzymology. Nat Prod Rep 29:1074-1098.
[0241] Kallberg M, Wang H, Wang S, Peng J, Wang Z, Lu H, Xu J (2012) Template-based protein structure modeling using the RaptorX web server. Nat Protoc 7:1511-1522.
[0242] Kirschning A, Hahn F (2012) Merging chemical synthesis and biosynthesis: a new chapter in the total synthesis of natural products and natural product libraries. Angew Chem Int Ed Engl 51:4012-4022.
[0243] Kries H, Niquille D L, Hilvert D (2015) A subdomain swap strategy for reengineering nonribosomal peptides. Chem Biol 22:640-648.
[0244] Lin K, Simossis V A, Taylor W R, Heringa J (2005) A simple and fast secondary structure prediction method using hidden neural networks. Bioinformatics 21:152-159.
[0245] Linne U, Doekel S, Marahiel M A (2001) Portability of epimerization domain and role of peptidyl carrier protein on epimerization activity in nonribosomal peptide synthetases. Biochemistry 40:15824-15834.
[0246] Marahiel M A, Stachelhaus T, Mootz H D (1997) Modular peptide synthetases involved in nonribosomal peptide synthesis. Chem. Rev. 97: 2651-2673.
[0247] Martin D P, Murrell B, Golden M, Khoosal A and Muhire B. (2015). RDP4: Detection and analysis of recombination patterns in virus genomes. Virus Evol, 1.
[0248] Mootz H, Schwarzer, Marahiel M A (2000) Construction of hybrid peptide synthetases by module and domain fusions. Proc Natl Acad Sci USA 11:5848-5853.
[0249] Nguyen K T, Ritz D, Gu J-Q, et al. (2006) Combinatorial biosynthesis of novel antibiotics related to daptomycin. Proc Natl Acad Sci USA 103:17462-17467.
[0250] O'Connell K M G, Hodgkinson J T, Sore H F, et al. (2013) Combating multidrug-resistant bacteria: current strategies for the discovery of novel antibacterials. Angew Chem Int Ed Engl. doi: 10.1002/anie.201209979 [Epub ahead of print].
[0251] Owen J G, Calcott M J, Robins K J, D F Ackerley. (2016). Generating functional recombinant NRPS enzymes in the laboratory setting via peptidyl carrier protein engineering. Cell Chemical Biology. 23(11): 1395-1406.
[0252] Pfeifer B A, Admiraal S J, Gramajo H, Cane D E, Khosla C. (2001) Biosynthesis of complex polyketides in a metabolically engineered strain of E. coli. Science. 291(5509): 1790-2.
[0253] Rausch C, Weber T, Kohlbacher O, et al. (2005) Specificity prediction of adenylation domains in nonribosomal peptide synthetases (NRPS) using transductive support vector machines (TSVMs). Nucleic Acids Res 33:5799-5808.
[0254] Rausch C, Hoof I, Weber T, Wohlleben W, Huson D H (2007) Phylogenetic analysis of condensation domains in NRPS sheds light on their functional evolution. BMC Evol Biol 7:78.
[0255] Rottig M, Medema M H, Blin K, et al. (2011) NRPSpredictor2—a web server for predicting NRPS adenylation domain specificity. Nucleic Acids Res 39:W362-W367.
[0256] Schneider A, Stachelhaus T, Marahiel M A (1998) Targeted alteration of the substrate specificity of peptide synthetases by rational module swapping. Mol Gen Genet 257:308-318.
[0257] Sieber S A, Marahiel M A (2005) Molecular mechanisms underlying nonribosomal peptide synthesis: approaches to new antibiotics. Chem Rev 105:715-738.
[0258] Simmonds P. (2006). Recombination and selection in the evolution of picornaviruses and other mammalian positive-stranded RNA viruses. J Virol. 80:11124-11140.
[0259] Simmonds P. (2012) SSE: a nucleotide and amino acid sequence analysis platform. BMC Res Notes. 5:50.Stachelhaus T, Mootz H D, Marahiel M A (1999) The specificity-conferring code of adenylation domains in nonribosomal peptide synthetases. Chem Biol 6:493-505.
[0260] Stachelhaus T, Schneider A, Marahiel M A (1995) Rational design of peptide antibiotics by targeted replacement of bacterial and fungal domains. Science 269:69-72.
[0261] Stein T, Vater J, Kruft V, et al. (1994) Detection of 4′-phosphopantetheine at the thioester binding site for L-valine of gramicidinS synthetase 2. FEBS Lett 340:39-44.
[0262] Stevens B W, Lilien R H, Georgiev I, et al. (2006) Redesigning the PheA Domain of Gramicidin Synthetase Leads to a New Understanding of the Enzyme's Mechanism and Selectivity. Biochemistry 45:15495-15504.
[0263] Strieker M, Tanovic A, Marahiel M A. (2010). Nonribosomal peptide synthetases: structures and dynamics. Curr Opin Struct Biol. 20, 234-240.
[0264] Süssmuth R D, Mainz A. (2017) Nonribosomal peptide synthesis-principles and prospects. Angew. Chem. Int. Ed. 56:3770-3821
[0265] Tanovic A, Samel S A, Essen L-O, Marahiel M A (2008) Crystal structure of the termination module of a nonribosomal peptide synthetase. Science 321:659-663.
[0266] Villiers B, Hollfelder F (2011) Directed evolution of a gatekeeper domain in nonribosomal peptide synthesis. Chem Biol 18:1290-1299.
[0267] Waterhouse A, Bertoni M, Bienert S, Studer G, Tauriello G, Gumienny R, Heer F T, de Beer T A P, Rempfer C, Bordoli L, Lepore R, Schwede T (2018) SWISS-MODEL: homology modelling of protein structures and complexes. Nucleic Acids Res 46:W296-W303.
[0268] Winn M, Fyans J K, Zhuo Y, Micklefield J (2016) Recent advances in engineering nonribosomal peptide assembly lines. Nat Prod Rep 33:317-347.
[0269] Yakimov M M, Giuliano L, Timmis K N, Golyshin P N (2000) Recombinant acylheptapeptide lichenysin: high level of production by Bacillus subtilis cells. J Mol Microbiol Biotechnol 2:217-224.
[0270] Zhang K, Nelson K M, Bhuripanyo K, et al. (2013) Engineering the substrate specificity of the DhbE adenylation domain by yeast cell surface display. Chem Biol 20:92-101.
[0271] Zhou Z, Lai J R, Walsh C T (2007) Directed evolution of aryl carrier proteins in the enterobactin synthetase. Proc Natl Acad Sci USA 104:11621-11626.

[0272] See also:
[0273] Finking R and M A Marahiel (2004) Biosynthesis of nonribosomal peptides, Annu Rev Microbiol 58: 453-488.
[0274] Challis G L, and Naismith J H (2004) Structural aspects of non-ribosomal peptide biosynthesis. Curr Opin Struct Biol 14(6): 748-756.
[0275] Marahiel M A and L O Essen (2009) Nonribosomal peptide synthetases: Mechanistic and structural aspects of essential domains. Methods in Enzymology 458: 337-351.
[0276] Cox, C D, K L Rinehart, Jr, M L Moore, and J C Cook, Jr (1981) Pyochelin: novel structure of an iron-chelating growth promoter for Pseudomonas aeruginosa. Proc Natl Acad Sci USA 78:4256-4260.
[0277] Ankenbauer, R, S Sriyosachati, and C D Cox (1985) Effects of siderophores on the growth of Pseudomonas aeruginosa in human serum and transferrin. Infect Immun 49:132-140.
[0278] Meyer, J M, A Stintzi, D De Vos, P Cornelis, R Tappe, K Taraz, and H Budzikiewicz (1997) Use of siderophores to type pseudomonads: the three Pseudomonas aeruginosa pyoverdine systems. Microbiology 143:35-43.
[0279] Ackerley, D F, T T Caradoc-Davies, and I L Lamont (2003) Substrate specificity of the nonribosomal peptide synthetase PvdD from Pseudomonas aeruginosa. J Bacteriol 185:2848-2855.
[0280] Beare, P A, R J For, L W Martin, and I L Lamont (2003) Siderophore-mediated cell signalling in Pseudomonas aeruginosa: divergent pathways regulate virulence factor production and siderophore receptor synthesis. Mol Microbiol 47:195-207.
[0281] Cunliffe, H E, T R Merriman, and I L Lamont (1995) Cloning and
[0282] characterization of pvdS, a gene required for pyoverdine synthesis in Pseudomonas aeruginosa: PvdS is probably an alternative sigma factor. J Bacteriol 177:2744-2750.
[0283] Handfield, M, D E Lehoux, F Sanschagrin, M J Mahan, D E Woods, and R C Levesque (2000) In vivo-induced genes in Pseudomonas aeruginosa. Infect Immun 68:2359-2362.
[0284] McMorran, B J, H M Kumara, K Sullivan, and I L Lamont (2001) Involvement of a transformylase enzyme in siderophore synthesis in Pseudomonas aeruginosa. Microbiology 147:1517-1524.
[0285] McMorran, B J, M E Merriman, I T Rombel, and I L Lamont (1996) Characterisation of the pvdE gene which is required for pyoverdine synthesis in Pseudomonas aeruginosa. Gene 176:55-59.
[0286] Miyazaki, H, H Kato, T Nakazawa, and M Tsuda (1995) A positive regulatory gene, pvdS, for expression of pyoverdin biosynthetic genes in Pseudomonas aeruginosa PAO. Mol Gen Genet 248:17-24.
[0287] Visca, P, A Ciervo, and N Orsi (1994) Cloning and nucleotide sequence of the pvdA gene encoding the pyoverdin biosynthetic enzyme l-ornithine N5-oxygenase in Pseudomonas aeruginosa. J Bacteriol 176:1128-1140.
[0288] J-M M Meyer (2000) Pyoverdines: pigments, siderophores and potential taxonomic markers of fluorescent Pseudomonas species. Archives of Microbiology 174(3):135-42.
[0289] J Ravel and P Cornelis (2003) Genomics of pyoverdine-mediated iron uptake in pseu-domonads. Trends in Microbiology 11(5):195-200.
[0290] C Georges and J M Meyer (1995) High-molecular-mass, iron-repressed cytoplasmic proteins in fluorescent Pseudomonas: potential peptide-synthetases for pyoverdine biosynthesis. FEMS Microbiology Letters 132(1-2):9-15.
[0291] D E Lehoux, F Sanschagrin, and R C Levesque (2000) Genomics of the 35-kb pvd locus and analysis of novel pvdIJK genes implicated in pyoverdine biosynthesis in Pseudomonas aeruginosa. FEMS Microbiology Letters 190(1):141-6.
[0292] D Mossialos, U Ochsner, C Baysse, P Chablain, J-P Pirnay, N Koedam, H Budzikiewicz, D U Fernandez, M Schafer, J Ravel, and P Cornelis (2002) Identification of new, conserved, non-ribosomal peptide synthetases from fluorescent pseudomonads involved in the biosynthesis of the siderophore pyoverdine. Molecular Microbiology 45(6):1673-85.
[0293] I L Lamont and L W Martin (2003) Identification and characterization of novel pyoverdine synthesis genes in Pseudomonas aeruginosa. Microbiology (Reading, England) 149(Pt 4): 833-42.
[0294] Mootz H D, Marahiel M A (1997) The tyrocidine biosynthesis operon of Bacillus brevis: complete nucleotide sequence and biochemical characterization of functional internal adenylation domains. J Bacteriol 179 (21): 6843-50.
[0295] Trauger J W, Kohli R M, Mootz H D, Marahiel M A, Walsh C T (2000) Peptide cyclization catalysed by the thioesterase domain of tyrocidine synthetase. Nature 407 (6801): 215-8.
[0296] Pfeifer B A, Admiraal S J, Gramajo H, Cane D E, Khosla C (2001) Biosynthesis of complex polyketides in a metabolically engineered strain of E. coli. Science 291(5509): 1790-1792.
[0297] L Kaysser (2019) Built to bind: biosynthetic strategies for the formation of small-molecule protease inhibitors. Natural Product Reports DOI: 10.1039/c8np00095f
[0298] Y Ogasawara and T Dairi (2018) Peptide epimerization machineries found in microorganisms. Front Microbiol doi.org/10.3389/fmicb.2018.00156
[0299] Süssmuth R D, Mainz A (2017) Nonribosomal peptide synthesis-principles and prospects. Angew Chem Int Ed 56:3770-3821.
[0300] Challis G, Ravel J, Townsend C (2000) Predictive, structure-based model of amino acid recognition by nonribosomal peptide synthetase adenylation domains. Cell Chem Biol 7(3):211-224.
[0301] Stachelhaus T, Mootz H D, Marahiel M A (1999) The specificity-conferring code of adenylation domains in nonribosomal peptide synthetases. Chem Biol 6(8):493-505.
[0302] Bachmann B, Ravel J. (2009) In silico prediction of microbial secondary metabolic pathways from DNA sequence data. Methods in Enzymology. 458:181-217.
[0303] Khayatt B I, Overmars L, Siezen R J, Francke C (2013) Classification of the adenylation and acyl-transferase activity of NRPS and PKS systems using ensembles of substrate specific hidden Markov models. PLOS ONE 8(4) e62136 1-10.

[0304] This application contains a sequence listing which has been submitted electronically in ASCII format and is hereby incorporated by reference in its entirety. Said ASCII copy, created on 8 Sep. 2020, is named 1240_WO1_SL.txt and is 1,485,098 bytes in size.

[0305] SEQ ID NO: 1-242 are set out in the sequence listing. The database sequence information (including sequences and accession numbers) provided with this description corresponds to the information accessed online as of 11 Sep. 2020.

[0306] Any references cited in this specification are hereby incorporated by reference. All amino acid and nucleotide sequences in the references cited in this specification are hereby incorporated into this disclosure. No admission is made that any reference constitutes prior art. Nor does discussion of any reference constitute an admission that such reference forms part of the common general knowledge in the art, in Australia or in any other country.

[0307] Persons of ordinary skill can utilise the disclosures and teachings herein to produce other embodiments and variations without undue experimentation. All such embodiments and variations are considered to be part of this invention.

[0308] Accordingly, one of ordinary skill in the art will readily appreciate from the disclosure that later modifications, substitutions, and/or variations performing substantially the same function or achieving substantially the same result as embodiments described herein may be utilised according to such related embodiments of the present invention. Thus, the invention is intended to encompass, within its scope, the modifications, substitutions, and variations to processes, manufactures, compositions of matter, compounds, means, methods, and/or steps disclosed herein.

[0309] The description herein may contain subject matter that falls outside of the scope of the claimed invention. This subject matter is included to aid understanding of the invention.

1. A non-naturally occurring non-ribosomal peptide synthetase (NRPS) module, which comprises, in an N-terminal to C-terminal direction: (1) an amino acid sequence from a first NRPS module comprising a C domain from the C1 motif to the C7 motif, joined to (2) an amino acid sequence from a second NRPS module comprising an A domain or a fragment thereof.

2. The NRPS module of claim 1, wherein the amino acid sequence from the second NRPS module begins at a site 1 to 24 amino acids, or 1 to 14 amino acids, following the terminal helix of the C domain of the first NRPS module.

3. The NRPS module of claim 1 or claim 2, wherein the amino acid sequence from the second NRPS module comprises an A domain of the second NRPS module, the A domain encompassing the linker helix to the A10 motif.

4. The NRPS module of claim 1 or claim 2, wherein the amino acid sequence from the second NRPS module begins at a site within the terminal helix of the C domain of the first NRPS module.

5. The NRPS module of claim 1 or claim 2, wherein the amino acid sequence from the second NRPS module begins at a site within the linker helix of the A domain of the first NRPS module.

6. The NRPS module of claim 1 or claim 2, wherein the amino acid sequence from the second NRPS module begins at a site immediately following the C-terminus of the terminal helix of the C domain of the first NRPS module.

7. The NRPS module of claim 1 or claim 2, wherein the amino acid sequence from the second NRPS module begins at a site immediately preceding the N-terminus of the linker helix of the A domain of the first NRPS module.

8. The NRPS module of claim 1 or claim 2, wherein the amino acid sequence from the second NRPS module begins at a site immediately preceding the C-terminus of the linker helix of the A domain of the first NRPS module.

9. The NRPS module of any one of claims 1 to 8, wherein the amino acid sequence from the second NRPS module ends at a site preceding the first helix of the T domain of the first NRPS module.

10. The NRPS module of any one of claims 1 to 8, wherein the amino acid sequence from the second NRPS module ends at a site in the first NRPS module encompassing: the residue immediately following the A domain binding pocket to 20 residues following the A10 motif.

11. The NRPS module of any one of claims 1 to 8, wherein the amino acid sequence from the second NRPS module ends at a site in the first NRPS module encompassing: the residue immediately following the A domain binding pocket to 10 residues following the A10 motif.

12. The NRPS module of any one of claims 1 to 11, wherein the first NRPS module and the second NRPS module have different substrate specificity.

13. The NRPS module of any one of claims 1 to 12, wherein the A domain of the first NRPS module and the A domain of the second NRPS module share less than 40%, less than 50%, less than 60% or less than 70% amino acid sequence identity.

14. The NRPS module of any one of claims 1 to 13, wherein the C domain of the first NRPS module and the C domain of the second NRPS module share less than 40%, less than 50%, less than 60% or less than 70% amino acid sequence identity.

15. The NRPS module of any one of claims 1 to 14, wherein the region intervening the A domain and the C domain of the first NRPS module and the region intervening the A domain and the C domain of the second NRPS module share less than 40%, less than 50%, less than 60% or less than 70% amino acid sequence identity.

16. The NRPS module of any one of claims 1 to 15, wherein the A domain binding pocket of the second NRPS module differs from the A domain binding pocket of the first NRPS module by 1 or more amino acids.

17. The NRPS module of any one of claims 1 to 15, wherein the A domain binding pocket of the second NRPS module differs from the A domain binding pocket of the first module by 2 or more, 3 or more, 4 or more, 5 or more, 6 or more, 7 or more, or 8 amino acids.

18. The NRPS module of claim 16 or claim 17, wherein one or more different amino acids in the A domain of the second NRPS module are selected from one or more of eight amino acids that determine specificity of the A domain.

19. The NRPS module of any one of claims 1 to 18, wherein downstream to the amino acid sequence from the second NRPS module includes a C-terminal sequence from the first NRPS module.

20. The NRPS module of claim 19, wherein the C-terminal sequence comprises a domain from the first NRPS module.

21. The NRPS module of any one of claims 1 to 18, wherein downstream to the amino acid sequence from the second NRPS module includes a C-terminal sequence from a third NRPS module.

22. The NRPS module of claim 21, wherein the C-terminal sequence comprises a domain from the third NRPS module.

23. The NRPS module of any one of claims 1 to 22, wherein the non-naturally occurring non-ribosomal peptide synthetase module has enzymatic activity.

24. An NRPS enzyme comprising the NRPS module of any one of claims 1 to 23.

25. A polynucleotide encoding the NRPS module of any one of claims 1 to 23.

26. A nucleic acid construct encoding the NRPS module of any one of claims 1 to 23.

27. A nucleic acid library, wherein a nucleic acid in the library encodes an NRPS module of any one of claims 1 to 23.

28. A host cell comprising the polynucleotide of claim 25 or the nucleic acid construct of claim 26.

29. A host cell comprising the nucleic acid library of claim 27.

30. A method for generating the NRPS module of any one of claims 1 to 23.

31. A method for production of a non-ribosomal peptide, the method comprising culturing the host cell of claim 28 or claim 29 to produce the non-ribosomal peptide.

32. A method for the production of a non-ribosomal peptide, the method comprising use of the NRPS module of any one of claims 1 to 23, the nucleic acid construct of claim 26, the library of claim 27, or the host cell of claim 28 or claim 29.

33. A kit comprising the NRPS module of any one of claims 1 to 23, the nucleic acid construct of claim 26, the library of claim 27, or the host cell of claim 28 or claim 29.

The application's sequence listing, which the Patent Office published only in electronic form, follows.

SEQUENCE LISTING (242 sequences)

SEQ ID NO: 1 - protein, 1046 aa, Artificial Sequence
  Description of Artificial Sequence: Synthetic polypeptide
QQPLALSFAQERQWFLWQLEPESAAYHIPSALRLRGRLDVDALQRSFDSLVARHETLRTRFRLEGGRSYQQVQPAVSVSIEREQFGEEGLIERIQAIVVQPFDLERGPLLRVNLLQLAEDDHVLVLVQHHIVSDGWSMQVMVEELVQLYAAYSQGLDVVLPALPIQYADYALWQRSWMEAGEKERQLAYWTGLLGGEQPVLELPFDRPRPARQSHRGAQLGFELSRELVEAVRALAQREGASSFMLLLASFQALLYRYSGQADIRVGVPIANRNRVETERLIGFFVNTQVLKADLDGRMGFDELLAQARQRALEAQAHQDLPFEQLVEALQPERNASHNPLFQVLFNHQSEIRSVTPEVQLEDLRLEGLAWDGQTAQFDLTLDIQEDENGIWASFDYATDLFDASTVERLAGHWRNLLRGIVANPRQRLGELPLLDAPERRQTLSEWNPAQRECAVQGTLQQRFEEQARQRPQAVALILDEQRLSYGELNARANRLAHCLIARGVGADVPVGLALERSLDMLVGLLAILKAGGAYLPLDPAAPEERLAHILDDSGVRLLLTQGHLLERLPRQAGVEVLAIDGLVLDGYAESDPLPTLSADNLAYVIYTSGSTGKPKGTLLTHRNALRLFSATEAWFGFDERDVWTLFHSYAFDFSVWEIFGALLYGGRLVIVPQWVSRSPEDFYRLLCREGVTVLNQTPSAFKQLMAVACSADMATQQPALRYVIFGGEALDLQSLRPWFQRFGDRQPQLVNMYGITETTVHVTYRPVSEADLKGGLVSPIGGTIPDLSWYILDRDLNPVPRGAVGELYIGRAGLARGYLRRPGLSATRFVPNPFPGGAGERLYRTGDLARFQADGNIEYIGRIDHQVKVRGFRIELGEIEAALAGLAGVRDAVVLAHDGVGGTQLVGYVVADSAEDAERLRESLRESLKRHLPDYMVPAHLMLLERMPLTVNGKLDRQALPQPDASLSQQAYRAPGSELEQRIAAIWAEILGVERVGLDDNFFELGGHSLLLLMLKERIGDTCQATLSISQLMTHASVAEQAACI

SEQ ID NO: 2 - protein, 1021 aa, Artificial Sequence
  Description of Artificial Sequence: Synthetic polypeptide
QDMYLLTPMQEGMLFHALLDEEHNSHLVQMSISIQGDLDVGLFTNSLHVLVERYDVFRTLFLYEKLKQPLQVVLKERPIPILFLDLTAYDEQEKQQRYTQYKRNDQEKTFQLAKDSLMRVAIFQMTESEYQIIWSFHHILMDGWCFSIIFDDLLSVYLSLKNGAPISLDPVQPYSQFIRWLEKQDKEAALAYWRDYLAQFEQQTSLPKFGKSSSKAFLPAQYRFVLDGMLTQQLSAIASQNQVTLPTVIQTLWGILLQSYNATNDVLFGSVVSGRPTEIVGIDKMVGLFINTIPFRIQAKNDQTFADLIQDVHQRTLQSQSYEHVPLYDIQNDSVLKQDLIDHLMVIENYPLVEALQKKASTQQVGFAISDVEMFEPTNYDMTVMVMPKEEIAMRFDYNAAVYDEAFIQKMAGHLKQIAACVTNNPKVTLQQVTLLTETEKQQLMARNLDTSAAYPTKTMHELFMEQVERTPDQVAVVFGEQQLTYQELDEKSNQLARFLRGKGIAADSLVGTMMDRSIEMVVGILGVLKAGGAFVPIDPELPEERIAYMLEHSGIQLVVTQHHLLEKVTTSTEKIDISAPAIWEESSASVEMINHPDDLFYIIYTSGTTGKPKGVMLEHKNMANLMHFTFTKTNIDFHEKVLQYTTCSFDVCYQEIFSTLLSGGQLYLITNEMRRHVEKLYAFIQEKQISILSLPVSFLKFIFNEKDYVQSFPRCVKHIITAGEQLVVTHELQKYLRNQHVFLHNHYGPSETHVVTTYTMDPSMDIPELPPIGKPISNTGIYILDEKLQMKPEGIVGELYISGANVGRGYLHNPELTAEKFLENPYQSGERMYRTGDLARWMPDGNIEFLGRIDHQVKIRGHRIELGEIESHLLNHALIKEAVVIDRTDETGGKYLCAYVVLTDEVSNEELRAYLSRTLPEYMIPSFFMNLERIPVTPNGKTDRRALPIPEGNAFTGADYLAPTTELEQKMAAIWENVLGVSPIGIQDNFFTLGGHSLKAIHLISRMHKDCQADVPLRVL

SEQ ID NO: 3 - DNA, 6051 bp, Artificial Sequence
  Description of Artificial Sequence: Synthetic polynucleotide
tcgcgcgtttcggtgatgacggtgaaaacctctgacacatgcagctcccggagacggtcacagcttgtctgtaagcggatgccgggagcagacaagcccgtcagggcgcgtcagcgggtgttggcgggtgtcggggctggcttaactatgcggcatcagagcagattgtactgagagtgcaccatacgaattggccgcggcgttgtgacaatttaccgaacaactccgcggccgggaagccgatctcggcttgaacgaattgttaggtggcggtacttgggtcgatatcaaagtgcatcacttcttcccgtatgcccaactttgtatagagagccactgcgggatcgtcaccgtaatctgcttgcacgtagatcacataagcaccaagcgcgttggcctcatgcttgaggagattgatgagcgcggtggcaatgccctgcctccggtgctcgccggagactgcgagatcatagatatagatctcactacgcggctgctcaaacctgggcagaacgtaagccgcgagagcgccaacaaccgcttcttggtcgaaggcagcaagcgcgatgaatgtcttactacggagcaagttcccgaggtaatcggagtccggctgatgttgggagtaggtggctacgtctccgaactcacgaccgaaaagatcaagagcagcccgcatggatttgacttggtcagggccgagcctacatgtgcgaatgatgcccatacttgagccacctaactttgttttagggcgactgccctgctgcgtaacatcgttgctgctgcgtaacatcgttgctgctccataacatcaaacatcgacccacggcgtaacgcgcttgctgcttggatgcccgaggcatagactgtacaaaaaaacagtcataacaagccatgaaaaccgccactgcgccgttaccaccgctgcgttcggtcaaggttctggaccagttgcgtgagcgcatacgctacttgcattacagtttacgaaccgaacaggcttatgtcaattcgcctctcaggcgccgctggtgccgctggttggacgccaagggtgaatccgcctcgataccctgattactcgcttcctgcgccctctcaggcggcgataggggactggtaaaacggggattgcccagacgcctcccccgccccttcaggggcacaaatgcggccccaacggggccacgtagtggtgcgttttttgcgtttccacccttttcttccttttcccttttaaaccttttaggacgtctacaggccacgtaatccgtggcctgtagagtttaaaaagggacggatttgttgccattaagggacggatttgttgttaagaagggacggatttgttgttgtaaagggacggatttgttgtattgtgggacgcagatacagtgtccccttatacacaaggaatgtcgaacgtggcctcacccccaatggtttacaaaagcaatgccctggtcgaggccgcgtatcgcctcagtgttcaggaacagcggatcgttctggcctgtattagccaggtgaagaggagcgagcctgtcaccgatgaagtgatgtattcagtgacggcggaggacatagcgacgatggcgggtgtccctatcgaatcttcctacaaccagctcaaagaagcggccctgcgcctgaaacggcgggaagtccggttaacccaagagcccaatggcaaggggaaaagaccgagtgtgatgattaccggctgggtgcaaacaatcatctaccgggagggtgagggccgtgtagaactcaggttcaccaaagacatgctgccgtacctgacggaactcaccaaacagttcaccaaatacgccttggctgacgtggccaagatggacagcacccacgcgatcaggctttacgagctgctcatgcaatgggacagcatcggccagcgcgaaatagaaattgaccagctgcgaaagtggtttcaactggaaggccggtatccctcgatcaaggacttcaagttgcgagtgcttgatccagccgtgacgcagatcaacgagcacagcccgctacaggtggagtgggcgcagcgaaagaccgggcgcaaggtcacacatctgttgttcagttttggaccgaagaagcccgccaaggcggtgggtaaggccccagcgaagcgcaaggccgggaagatttcagatgctgagatcgcgaaacaggctcgccctggtgagacatgggaagcggcccgcgctcgactaacccagatgccgctggatctggcctagaggccgtggccaccacggcccggcctgcctttcaggctgcgcaactgttgggaagggcgatcggtgcgggcctcttcgctattacgccagctggcgaaagggggatgtgctgcaaggcgattaagttgggtaacgccagggttttcccagtcacgacgttgtaaaacgacggccagtgccaagcttgcatgcctgcataatgtgcctgtcaaatggacgaagcagggattctgcaaaccctatgctactccgtcaagccgtcaattgtctgattcgttaccaattatgacaacttgacggctacatcattcactttttcttcacaaccggcacggaactcgctcgggctggccccggtgcattttttaaatacccgcgagaaatagagttgatcgtcaaaaccaacattgcgaccgacggtggcgataggcatccgggtggtgctcaaaagcagcttcgcctggctgatacgttggtcctcgcgccagcttaagacgctaatccctaactgctggcggaaaagatgtgacagacgcgacggcgacaagcaaacatgctgtgcgacgctggcgatatcaaaattgctgtctgccaggtgatcgctgatgtactgacaagcctcgcgtacccgattatccatcggtggatggagcgactcgttaatcgcttccatgcgccgcagtaacaattgctcaagcagatttatcgccagcagctccgaatagcgcccttccccttgcccggcgttaatgatttgcccaaacaggtcgctgaaatgcggctggtgcgcttcatccgggcgaaagaaccccgtattggcaaatattgacggccagttaagccattcatgccagtaggcgcgcggacgaaagtaaacccactggtgataccattcgcgagcctccggatgacgaccgtagtgatgaatctctcctggcgggaacagcaaaatatcacccggtcggcaaacaaattctcgtccctgatttttcaccaccccctgaccgcgaatggtgagattgagaatataacctttcattcccagcggtcggtcgataaaaaaatcgagataaccgttggcctcaatcggcgttaaacccgccaccagatgggcattaaacgagtatcccggcagcaggggatcattttgcgcttcagccatacttttcatactcccgccattcagagaagaaaccaattgtccatattgcatcagacattgccgtcactgcgtcttttactggctcttctcgctaaccaaaccggtaaccccgcttattaaaagcattctgtaacaaagcgggaccaaagccatgacaaaaacgcgtaacaaaagtgtctataatcacggcagaaaagtccacattgattatttgcacggcgtcacactttgctatgccatagcatttttatccataagattagcggatcctacctgacgctttttatcgcaactctctactgtttctccatacccgtttttttgggctagcgaattcctgcagcccgggggatccactagttctagagcggccgccaccgcggtggagctcgaattcgtaatcatggtcatagctgtttcctgtgtgaaattgttatccgctcacaattccacacaacatacgagccggaagcataaagtgtaaagcctggggtgcctaatgagtgagctaactcacattaattgcgttgcgctcactgcccgctttccagtcgggaaacctgtcgtgccagctgcattaatgaatcggccaacgcgcggggagaggcggtttgcgtattgggcgctcttccgcttcctcgctcactgactcgctgcgctcggtcgttcggctgcggcgagcggtatcagctcactcaaaggcggtaatacggttatccacagaatcaggggataacgcaggaaagaacatgtgagcaaaaggccagcaaaaggccaggaaccgtaaaaaggccgcgttgctggcgtttttccataggctccgcccccctgacgagcatcacaaaaatcgacgctcaagtcagaggtggcgaaacccgacaggactataaagataccaggcgtttccccctggaagctccctcgtgcgctctcctgttccgaccctgccgcttaccggatacctgtccgcctttctcccttcgggaagcgtggcgctttctcatagctcacgctgtaggtatctcagttcggtgtaggtcgttcgctccaagctgggctgtgtgcacgaaccccccgttcagcccgaccgctgcgccttatccggtaactatcgtcttgagtccaacccggtaagacacgacttatcgccactggcagcagccactggtaacaggattagcagagcgaggtatgtaggcggtgctacagagttcttgaagtggtggcctaactacggctacactagaaggacagtatttggtatctgcgctctgctgaagccagttaccttcggaaaaagagttggtagctcttgatccggcaaacaaaccaccgctggtagcggtggtttttttgtttgcaagcagcagattacgcgcagaaaaaaaggatctcaagaagatcctttgatcttttctacggggtctgacgctcagtggaacgaaaactcacgttaagggattttggtcatgagattatcaaaaaggatcttcacctagatccttttaaattaaaaatgaagttttaaatcaatctaaagtatatatgagtaaacttggtctgacagttaccaatgcttaatcagtgaggcacctatctcagcgatctgtctatttcgttcatccatagttgcctgactccccgtcgtgtagataactacgatacgggagggcttaccatctggccccagtgctgcaatgataccgcgagacccacgctcaccggctccagatttatcagcaataaaccagccagccggaagggccgagcgcagaagtggtcctgcaactttatccgcctccatccagtctattaattgttgccgggaagctagagtaagtagttcgccagttaatagtttgcgcaacgttgttgccattgctacaggcatcgtggtgtcacgctcgtcgtttggtatggcttcattcagctccggttcccaacgatcaaggcgagttacatgatcccccatgttgtgcaaaaaagcggttagctccttcggtcctccgatcgttgtcagaagtaagttggccgcagtgttatcactcatggttatggcagcactgcataattctcttactgtcatgccatccgtaagatgcttttctgtgactggtgagtactcaaccaagtcattctgagaatagtgtatgcggcgaccgagttgctcttgcccggcgtcaatacgggataataccgcgccacatagcagaactttaaaagtgctcatcattggaaaacgttcttcggggcgaaaactctcaaggatcttaccgctgttgagatccagttcgatgtaacccactcgtgcacccaactgatcttcagcatcttttactttcaccagcgtttctgggtgagcaaaaacaggaaggcaaaatgccgcaaaaaagggaataagggcgacacggaaatgttgaatactcatactcttcctttttcaatattattgaagcatttatcagggttattgtctcatgagcggatacatatttgaatgtatttagaaaaataaacaaataggggttccgcgcacatttccccgaaaagtgccacctgacgtctaagaaaccattattatcatgacattaacctataaaaataggcgtatcacgaggccctttcgtc

SEQ ID NO: 4 - DNA, 10426 bp, Artificial Sequence
  Description of Artificial Sequence: Synthetic polynucleotide
tcgcgcgtttcggtgatgacggtgaaaacctctgacacatgcagctcccggagacggtcacagcttgtctgtaagcggatgccgggagcagacaagcccgtcagggcgcgtcagcgggtgttggcgggtgtcggggctggcttaactatgcggcatcagagcagattgtactgagagtgcaccatacgaattggccgcggcgttgtgacaatttaccgaacaactccgcggccgggaagccgatctcggcttgaacgaattgttaggtggcggtacttgggtcgatatcaaagtgcatcacttcttcccgtatgcccaactttgtatagagagccactgcgggatcgtcaccgtaatctgcttgcacgtagatcacataagcaccaagcgcgttggcctcatgcttgaggagattgatgagcgcggtggcaatgccctgcctccggtgctcgccggagactgcgagatcatagatatagatctcactacgcggctgctcaaacctgggcagaacgtaagccgcgagagcgccaacaaccgcttcttggtcgaaggcagcaagcgcgatgaatgtcttactacggagcaagttcccgaggtaatcggagtccggctgatgttgggagtaggtggctacgtctccgaactcacgaccgaaaagatcaagagcagcccgcatggatttgacttggtcagggccgagcctacatgtgcgaatgatgcccatacttgagccacctaactttgttttagggcgactgccctgctgcgtaacatcgttgctgctgcgtaacatcgttgctgctccataacatcaaacatcgacccacggcgtaacgcgcttgctgcttggatgcccgaggcatagactgtacaaaaaaacagtcataacaagccatgaaaaccgccactgcgccgttaccaccgctgcgttcggtcaaggttctggaccagttgcgtgagcgcatacgctacttgcattacagtttacgaaccgaacaggcttatgtcaattcgcctctcaggcgccgctggtgccgctggttggacgccaagggtgaatccgcctcgataccctgattactcgcttcctgcgccctctcaggcggcgataggggactggtaaaacggggattgcccagacgcctcccccgccccttcaggggcacaaatgcggccccaacggggccacgtagtggtgcgttttttgcgtttccacccttttcttccttttcccttttaaaccttttaggacgtctacaggccacgtaatccgtggcctgtagagtttaaaaagggacggatttgttgccattaagggacggatttgttgttaagaagggacggatttgttgttgtaaagggacggatttgttgtattgtgggacgcagatacagtgtccccttatacacaaggaatgtcgaacgtggcctcacccccaatggtttacaaaagcaatgccctggtcgaggccgcgtatcgcctcagtgttcaggaacagcggatcgttctggcctgtattagccaggtgaagaggagcgagcctgtcaccgatgaagtgatgtattcagtgacggcggaggacatagcgacgatggcgggtgtccctatcgaatcttcctacaaccagctcaaagaagcggccctgcgcctgaaacggcgggaagtccggttaacccaagagcccaatggcaaggggaaaagaccgagtgtgatgattaccggctgggtgcaaacaatcatctaccgggagggtgagggccgtgtagaactcaggttcaccaaagacatgctgccgtacctgacggaactcaccaaacagttcaccaaatacgccttggctgacgtggccaagatggacagcacccacgcgatcaggctttacgagctgctcatgcaatgggacagcatcggccagcgcgaaatagaaattgaccagctgcgaaagtggtttcaactggaaggccggtatccctcgatcaaggacttcaagttgcgagtgcttgatccagccgtgacgcagatcaacgagcacagcccgctacaggtggagtgggcgcagcgaaagaccgggcgcaaggtcacacatctgttgttcagttttggaccgaagaagcccgccaaggcggtgggtaaggccccagcgaagcgcaaggccgggaagatttcagatgctgagatcgcgaaacaggctcgccctggtgagacatgggaagcggcccgcgctcgactaacccagatgccgctggatctggcctagaggccgtggccaccacggcccggcctgcctttcaggctgcgcaactgttgggaagggcgatcggtgcgggcctcttcgctattacgccagctggcgaaagggggatgtgctgcaaggcgattaagttgggtaacgccagggttttcccagtcacgacgttgtaaaacgacggccagtgccaagcttgcatgcctgcataatgtgcctgtcaaatggacgaagcagggattctgcaaaccctatgctactccgtcaagccgtcaattgtctgattcgttaccaattatgacaacttgacggctacatcattcactttttcttcacaaccggcacggaactcgctcgggctggccccggtgcattttttaaatacccgcgagaaatagagttgatcgtcaaaaccaacattgcgaccgacggtggcgataggcatccgggtggtgctcaaaagcagcttcgcctggctgatacgttggtcctcgcgccagcttaagacgctaatccctaactgctggcggaaaagatgtgacagacgcgacggcgacaagcaaacatgctgtgcgacgctggcgatatcaaaattgctgtctgccaggtgatcgctgatgtactgacaagcctcgcgtacccgattatccatcggtggatggagcgactcgttaatcgcttccatgcgccgcagtaacaattgctcaagcagatttatcgccagcagctccgaatagcgcccttccccttgcccggcgttaatgatttgcccaaacaggtcgctgaaatgcggctggtgcgcttcatccgggcgaaagaaccccgtattggcaaatattgacggccagttaagccattcatgccagtaggcgcgcggacgaaagtaaacccactggtgataccattcgcgagcctccggatgacgaccgtagtgatgaatctctcctggcgggaacagcaaaatatcacccggtcggcaaacaaattctcgtccctgatttttcaccaccccctgaccgcgaatggtgagattgagaatataacctttcattcccagcggtcggtcgataaaaaaatcgagataaccgttggcctcaatcggcgttaaacccgccaccagatgggcattaaacgagtatcccggcagcaggggatcattttgcgcttcagccatacttttcatactcccgccattcagagaagaaaccaattgtccatattgcatcagacattgccgtcactgcgtcttttactggctcttctcgctaaccaaaccggtaaccccgcttattaaaagcattctgtaacaaagcgggaccaaagccatgacaaaaacgcgtaacaaaagtgtctataatcacggcagaaaagtccacattgattatttgcacggcgtcacactttgctatgccatagcatttttatccataagattagcggatcctacctgacgctttttatcgcaactctctactgtttctccatacccgtttttttgggctagcgaattcccatatgcaagcactcatagagaaggtgggctccctttccccccaggaaaggaaggcattggctgtcctgctcaagcagcaaggtgtcaatctcttcgagatcgcgccagtgttcaagcgccaggacggcgagcccctgcggctctcctatgcccaggagcgacagtggtttctctggcaactggagccggaaagcgcggcctaccatatcccgagtgtcttgcgtctacgtgggcggctggacctggatgccctgcaacgcagcttcgacagcctggttgcgcggcacgagaccctacgcacccgttttcgcctcgacggcgacgaggcgcgccaggagatcgccgcatccatggcattgccgttggatatcgtcgcgttggggccgctcgaggagggcgccctcgctcggcaggtcgagacgacgatcgcgcggccgttcgacctggagcgtgggccgctgctgcgggtgagcctgttgcggctggccgaggacgaccatgtgctggtgctggtccagcatcacatcgtgtccgacggttggtcgatgcaggtgatggtcgaggaactggtccagctctatgccgcctatagtcgagggctcgaggtagcgctgccggctttgccgatccagtacgcggactacgccctgtggcagcgcagctggatggaggccggggaaaaggagcgccagttggcgtactggaccggcctgctgggcggcgagcagccggtgctggagttgccgttcgaccggccgcgcccggttcggcaaagccatcgtggtgcccagttcatcctggaactggatattgatctgtcccaggcgctcaggcgcgtggcccagcaggagggggctactgccttcgccctgttgctggcttcgttccaggcgctgctgtatcgctacagcgggcaggcggatatccgtgtcggcgtgccgatcgccaatcgcaaccgcgtggagaccgagcggctgatcggcttcttcgtcaacacccaggtgctcaaggccgacctggacggtcggatgggcttcgacgagctgctggcccaggcccgccaacgcgcgctggaggcccaggcgcaccaggacctgccgttcgagcaactggtggaggccttgcagccggagcgcagtcttagccacaacccgctgttccaggtgctgttcaactaccagagcgaagcccgtggcaacggccaggcattccgcttcgacgagttacagatggaaagcgtgcagttcgacagccggacggcgcagttcgacttgacgttggacctgacggacgaagagcagcgtttttgcgccgttttcgactacgccaccgacctgttcgacgcctccaccgtggaacgcctggccggccattggcgcaacctgttgcgcggcatcgtcgccaacccacgacagcggctcggcgagttgccgctgctggatgcgccggagcgccggcagaccctctccgaatggaacccggcccagcgcgagtgcgcggtgcagggcaccttgcagcagcgtttcgaggaacaggcgcggcaacggccacaggcggttgcgctgatcctcgacgaacaacggttgagctacggcgaactgaatgcgcgggccaatcgcctggcgcactgcctgatcgcccgtggcgttggcgcggacgtgccggtcgggctggcgctggagcgttcgctggacatgctggtcggcttgctggcgatcctcaaggccggcggcgcctacctgccgttggacccggcggcgccagaggagcgcctggcgcatatcctcgacgacagtggggtacggctgctgctgacccaggggcatctgctcgagcgcctgccacggcaggcgggggtggaggtgctggccatcgacggactggtgctggacggctacgccgagagcgatccgctcccgacgctatcggcggacaacctggcctacgtgatctatacctcgggctcgaccggcaagcccaagggcacattgctcacccaccgcaacgcgctgcgcctgttcagcgccaccgaggcctggttcggcttcgacgagcgggacgtgtggacattgttccattcctacgccttcgatttctcggtctgggaaatcttcggcgcgctgctctatggcgggtgcctggtgattgtgccgcaatgggtgagccgttcgccggaagacttctaccgtctgctgtgccgcgaaggcgtgacggtgctcaaccagacgccgtcggcgttcaagcaactgatggcggtggcctgttccgccgacatggcgacgcagcagccggcgctgcgctacgtgatcttcggtggcgaggcgctggatctgcagagcctgcggccgtggttccagcgcttcggcgatcgccagccgcaactggtgaacatgtacggcatcaccgagaccacggtgcacgtaacctaccgtccggtgagcgaggccgacctggaaggtggcctggtcagtccgattggcgggaccatcccggacctgtcctggtacatcctcgaccgtgacctgaacccggtgccgcgcggcgcggtgggcgagctgtacatcggtcgcgccgggctggcgcgcggctacctgaggcggcccgggttgagtgccacccgcttcgtgccgaacccgttccccggcggcgccggcgagcggctgtaccgtaccggcgacctggcacggttccaggcggatggcaatatcgagtacatcgggcgtatcgaccaccaggtgaaggttcgcggcttccgtatcgaactgggcgagatcgaagcggcgctcgccggtctggccggggtacgcgatgccgtggtgctggcccatgacggagtcggcggcacgcaactggtgggatacgtggtggcggactcggcggaggatgccgagcgtctgcgggagtcgctgcgggagtcgctgaagcggcacctgccggactacatggtgccggcgcacctgatgctgctggagcggatgccgctgacggtcaatggcaagctcgaccggcaggcgttgccgcaaccggatgcgagcctgtcgcaacaggcctatcgagcgcccggtagcgagctggagcagcgcatcgcagcgatctggtcggagatcctgggagtggaacgggtcggcctggacgacaacttcttcgaactgggcggtcattcgttgctggctacccgggtgatttctcgggttcgccaggagcagcagttggacgcaagcctgaaggcgttgttcgagcggccggttctggaagcgttcgcccagggattgactagttctagagcggccgcgtcgcagcaggcctatcgagcgcccggtagcgagctggagcagcgcatcgcagcgatctgggcggagatcctgggagtggaacgggtcggcctggacgacaacttcttcgaactgggcggtcactcattgttgctgctgatgctcaaggagcggatcggcgatacctgccaggctacgctgagcatcagccaactgatgacccatgccagcgtcgcggaacaggcggcatgcatcgaggggcaggcgcgtgagtcgttgctggtgccgctcaacggcaggcgcgaaggttcgccgctgttcatgttccatccgagtttcggctctgtgcactgttacaagaccctcgccatggcgctgcgggatcgtcatccggtcaagggtgttgtctgccgtgccctgctgggcgctggtcgcgaggtgccggagtgggacgatatggttgcggaatacgccgagcaattgctgcaggagcaccccgaaggggttttcaacctggcgggatggtcgctcggcggcaacctggcgatggatgtcgcggcccggctggagcagcgtgggcggcaggtggctttcgtcggctggatcgatgcaccggcaccggtcagggtcgaagcgttctggaacgagatcgggccgacgccggaggcagtcccgaacctatccgtgggcgagatgcgggtggaactgctcggtgtcatgtttccggagcgggccgagcatatcgaacgggcctggtcatcgatctgctccgccacgacggacgatgagcagcgctggacgaggatgagcgactgggcggaagcggagatcggcgccgagttcgcgacactgcgcagcgaaatcgcacagagcaacgaactggaagtgtcctgggagttgaaacagatcctcgacgagcgcctgaaagcgatggattacccgcgtctgacggcgaaggtcagcctctggtgggccgcgcgcagcaccaatgccatccagcggagcgcggtggagcgctcgatggccgaggcgatcggggctgagcgtgtcgaaccggtgcgggtgctggatacccggcacgacaagatcatcgaccaccctgagtttgtgcagagcttccgggccgccctggagcgtgccgggcgctgagagctcgaattcgtaatcatggtcatagctgtttcctgtgtgaaattgttatccgctcacaattccacacaacatacgagccggaagcataaagtgtaaagcctggggtgcctaatgagtgagctaactcacattaattgcgttgcgctcactgcccgctttccagtcgggaaacctgtcgtgccagctgcattaatgaatcggccaacgcgcggggagaggcggtttgcgtattgggcgctcttccgcttcctcgctcactgactcgctgcgctcggtcgttcggctgcggcgagcggtatcagctcactcaaaggcggtaatacggttatccacagaatcaggggataacgcaggaaagaacatgtgagcaaaaggccagcaaaaggccaggaaccgtaaaaaggccgcgttgctggcgtttttccataggctccgcccccctgacgagcatcacaaaaatcgacgctcaagtcagaggtggcgaaacccgacaggactataaagataccaggcgtttccccctggaagctccctcgtgcgctctcctgttccgaccctgccgcttaccggatacctgtccgcctttctcccttcgggaagcgtggcgctttctcatagctcacgctgtaggtatctcagttcggtgtaggtcgttcgctccaagctgggctgtgtgcacgaaccccccgttcagcccgaccgctgcgccttatccggtaactatcgtcttgagtccaacccggtaagacacgacttatcgccactggcagcagccactggtaacaggattagcagagcgaggtatgtaggcggtgctacagagttcttgaagtggtggcctaactacggctacactagaaggacagtatttggtatctgcgctctgctgaagccagttaccttcggaaaaagagttggtagctcttgatccggcaaacaaaccaccgctggtagcggtggtttttttgtttgcaagcagcagattacgcgcagaaaaaaaggatctcaagaagatcctttgatcttttctacggggtctgacgctcagtggaacgaaaactcacgttaagggattttggtcatgagattatcaaaaaggatcttcacctagatccttttaaattaaaaatgaagttttaaatcaatctaaagtatatatgagtaaacttggtctgacagttaccaatgcttaatcagtgaggcacctatctcagcgatctgtctatttcgttcatccatagttgcctgactccccgtcgtgtagataactacgatacgggagggcttaccatctggccccagtgctgcaatgataccgcgagacccacgctcaccggctccagatttatcagcaataaaccagccagccggaagggccgagcgcagaagtggtcctgcaactttatccgcctccatccagtctattaattgttgccgggaagctagagtaagtagttcgccagttaatagtttgcgcaacgttgttgccattgctacaggcatcgtggtgtcacgctcgtcgtttggtatggcttcattcagctccggttcccaacgatcaaggcgagttacatgatcccccatgttgtgcaaaaaagcggttagctccttcggtcctccgatcgttgtcagaagtaagttggccgcagtgttatcactcatggttatggcagcactgcataattctcttactgtcatgccatccgtaagatgcttttctgtgactggtgagtactcaaccaagtcattctgagaatagtgtatgcggcgaccgagttgctcttgcccggcgtcaatacgggataataccgcgccacatagcagaactttaaaagtgctcatcattggaaaacgttcttcggggcgaaaactctcaaggatcttaccgctgttgagatccagttcgatgtaacccactcgtgcacccaactgatcttcagcatcttttactttcaccagcgtttctgggtgagcaaaaacaggaaggcaaaatgccgcaaaaaagggaataagggcgacacggaaatgttgaatactcatactcttcctttttcaatattattgaagcatttatcagggttattgtctcatgagcggatacatatttgaatgtatttagaaaaataaacaaataggggttccgcgcacatttccccgaaaagtgccacctgacgtctaagaaaccattattatcatgacattaacctataaaaataggcgtatcacgaggccctttcgtc

SEQ ID NO: 5 - DNA, 11876 bp, Artificial Sequence
  Description of Artificial Sequence: Synthetic polynucleotide
tcgcgcgtttcggtgatgacggtgaaaacctctgacacatgcagctcccggagacggtcacagcttgtctgtaagcggatgccgggagcagacaagcccgtcagggcgcgtcagcgggtgttggcgggtgtcggggctggcttaactatgcggcatcagagcagattgtactgagagtgcaccatacgaattggccgcggcgttgtgacaatttaccgaacaactccgcggccgggaagccgatctcggcttgaacgaattgttaggtggcggtacttgggtcgatatcaaagtgcatcacttcttcccgtatgcccaactttgtatagagagccactgcgggatcgtcaccgtaatctgcttgcacgtagatcacataagcaccaagcgcgttggcctcatgcttgaggagattgatgagcgcggtggcaatgccctgcctccggtgctcgccggagactgcgagatcatagatatagatctcactacgcggctgctcaaacctgggcagaacgtaagccgcgagagcgccaacaaccgcttcttggtcgaaggcagcaagcgcgatgaatgtcttactacggagcaagttcccgaggtaatcggagtccggctgatgttgggagtaggtggctacgtctccgaactcacgaccgaaaagatcaagagcagcccgcatggatttgacttggtcagggccgagcctacatgtgcgaatgatgcccatacttgagccacctaactttgttttagggcgactgccctgctgcgtaacatcgttgctgctgcgtaacatcgttgctgctccataacatcaaacatcgacccacggcgtaacgcgcttgctgcttggatgcccgaggcatagactgtacaaaaaaacagtcataacaagccatgaaaaccgccactgcgccgttaccaccgctgcgttcggtcaaggttctggaccagttgcgtgagcgcatacgctacttgcattacagtttacgaaccgaacaggcttatgtcaattcgcctctcaggcgccgctggtgccgctggttggacgccaagggtgaatccgcctcgataccctgattactcgcttcctgcgccctctcaggcggcgataggggactggtaaaacggggattgcccagacgcctcccccgccccttcaggggcacaaatgcggccccaacggggccacgtagtggtgcgttttttgcgtttccacccttttcttccttttcccttttaaaccttttaggacgtctacaggccacgtaatccgtggcctgtagagtttaaaaagggacggatttgttgccattaagggacggatttgttgttaagaagggacggatttgttgttgtaaagggacggatttgttgtattgtgggacgcagatacagtgtccccttatacacaaggaatgtcgaacgtggcctcacccccaatggtttacaaaagcaatgccctggtcgaggccgcgtatcgcctcagtgttcaggaacagcggatcgttctggcctgtattagccaggtgaagaggagcgagcctgtcaccgatgaagtgatgtattcagtgacggcggaggacatagcgacgatggcgggtgtccctatcgaatcttcctacaaccagctcaaagaagcggccctgcgcctgaaacggcgggaagtccggttaacccaagagcccaatggcaaggggaaaagaccgagtgtgatgattaccggctgggtgcaaacaatcatctaccgggagggtgagggccgtgtagaactcaggttcaccaaagacatgctgccgtacctgacggaactcaccaaacagttcaccaaatacgccttggctgacgtggccaagatggacagcacccacgcgatcaggctttacgagctgctcatgcaatgggacagcatcggccagcgcgaaatagaaattgaccagctgcgaaagtggtttcaactggaaggccggtatccctcgatcaaggacttcaagttgcgagtgcttgatccagccgtgacgcagatcaacgagcacagcccgctacaggtggagtgggcgcagcgaaagaccgggcgcaaggtcacacatctgttgttcagttttggaccgaagaagcccgccaaggcggtgggtaaggccccagcgaagcgcaaggccgggaagatttcagatgctgagatcgcgaaacaggctcgccctggtgagacatgggaagcggcccgcgctcgactaacccagatgccgctggatctggcctagaggccgtggccaccacggcccggcctgcctttcaggctgcgcaactgttgggaagggcgatcggtgcgggcctcttcgctattacgccagctggcgaaagggggatgtgctgcaaggcgattaagttgggtaacgccagggttttcccagtcacgacgttgtaaaacgacggccagtgccaagcttgcatgcctgcataatgtgcctgtcaaatggacgaagcagggattctgcaaaccctatgctactccgtcaagccgtcaattgtctgattcgttaccaattatgacaacttgacggctacatcattcactttttcttcacaaccggcacggaactcgctcgggctggccccggtgcattttttaaatacccgcgagaaatagagttgatcgtcaaaaccaacattgcgaccgacggtggcgataggcatccgggtggtgctcaaaagcagcttcgcctggctgatacgttggtcctcgcgccagcttaagacgctaatccctaactgctggcggaaaagatgtgacagacgcgacggcgacaagcaaacatgctgtgcgacgctggcgatatcaaaattgctgtctgccaggtgatcgctgatgtactgacaagcctcgcgtacccgattatccatcggtggatggagcgactcgttaatcgcttccatgcgccgcagtaacaattgctcaagcagatttatcgccagcagctccgaatagcgcccttccccttgcccggcgttaatgatttgcccaaacaggtcgctgaaatgcggctggtgcgcttcatccgggcgaaagaaccccgtattggcaaatattgacggccagttaagccattcatgccagtaggcgcgcggacgaaagtaaacccactggtgataccattcgcgagcctccggatgacgaccgtagtgatgaatctctcctggcgggaacagcaaaatatcacccggtcggcaaacaaattctcgtccctgatttttcaccaccccctgaccgcgaatggtgagattgagaatataacctttcattcccagcggtcggtcgataaaaaaatcgagataaccgttggcctcaatcggcgttaaacccgccaccagatgggcattaaacgagtatcccggcagcaggggatcattttgcgcttcagccatacttttcatactcccgccattcagagaagaaaccaattgtccatattgcatcagacattgccgtcactgcgtcttttactggctcttctcgctaaccaaaccggtaaccccgcttattaaaagcattctgtaacaaagcgggaccaaagccatgacaaaaacgcgtaacaaaagtgtctataatcacggcagaaaagtccacattgattatttgcacggcgtcacactttgctatgccatagcatttttatccataagattagcggatcctacctgacgctttttatcgcaactctctactgtttctccatacccgtttttttgggctagcgaattcccatatgcaagcactcatagagaaggtgggctccctttccccccaggaaaggaaggcattggctgtcctgctcaagcagcaaggtgtcaatctcttcgagatcgcgccagtgttcaagcgccaggacggcgagcccctgcggctctcctatgcccaggagcgacagtggtttctctggcaactggagccggaaagcgcggcctaccatatcccgagtgtcttgcgtctacgtgggcggctggacctggatgccctgcaacgcagcttcgacagcctggttgcgcggcacgagaccctacgcacccgttttcgcctcgacggcgacgaggcgcgccaggagatcgccgcatccatggcattgccgttggatatcgtcgcgttggggccgctcgaggagggcgccctcgctcggcaggtcgagacgacgatcgcgcggccgttcgacctggagcgtgggccgctgctgcgggtgagcctgttgcggctggccgaggacgaccatgtgctggtgctggtccagcatcacatcgtgtccgacggttggtcgatgcaggtgatggtcgaggaactggtccagctctatgccgcctatagtcgagggctcgaggtagcgctgccggctttgccgatccagtacgcggactacgccctgtggcagcgcagctggatggaggccggggaaaaggagcgccagttggcgtactggaccggcctgctgggcggcgagcagccggtgctggagttgccgttcgaccggccgcgcccggttcggcaaagccatcgtggtgcccagttcatcctggaactggatattgatctgtcccaggcgctcaggcgcgtggcccagcaggagggggctactgccttcgccctgttgctggcttcgttccaggcgctgctgtatcgctacagcgggcaggcggatatccgtgtcggcgtgccgatcgccaatcgcaaccgcgtggagaccgagcggctgatcggcttcttcgtcaacacccaggtgctcaaggccgacctggacggtcggatgggcttcgacgagctgctggcccaggcccgccaacgcgcgctggaggcccaggcgcaccaggacctgccgttcgagcaactggtggaggccttgcagccggagcgcagtcttagccacaacccgctgttccaggtgctgttcaactaccagagcgaagcccgtggcaacggccaggcattccgcttcgacgagttacagatggaaagcgtgcagttcgacagccggacggcgcagttcgacttgacgttggacctgacggacgaagagcagcgtttttgcgccgttttcgactacgccaccgacctgttcgacgcctccaccgtggaacgcctggccggccattggcgcaacctgttgcgcggcatcgtcgccaacccacgacagcggctcggcgagttgccgctgctggatgcgccggagcgccggcagaccctctccgaatggaacccggcccagcgcgagtgcgcggtgcagggcaccttgcagcagcgtttcgaggaacaggcgcggcaacggccacaggcggttgcgctgatcctcgacgaacaacggttgagctacggcgaactgaatgcgcgggccaatcgcctggcgcactgcctgatcgcccgtggcgttggcgcggacgtgccggtcgggctggcgctggagcgttcgctggacatgctggtcggcttgctggcgatcctcaaggccggcggcgcctacctgccgttggacccggcggcgccagaggagcgcctggcgcatatcctcgacgacagtggggtacggctgctgctgacccaggggcatctgctcgagcgcctgccacggcaggcgggggtggaggtgctggccatcgacggactggtgctggacggctacgccgagagcgatccgctcccgacgctatcggcggacaacctggcctacgtgatctatacctcgggctcgaccggcaagcccaagggcacattgctcacccaccgcaacgcgctgcgcctgttcagcgccaccgaggcctggttcggcttcgacgagcgggacgtgtggacattgttccattcctacgccttcgatttctcggtctgggaaatcttcggcgcgctgctctatggcgggtgcctggtgattgtgccgcaatgggtgagccgttcgccggaagacttctaccgtctgctgtgccgcgaaggcgtgacggtgctcaaccagacgccgtcggcgttcaagcaactgatggcggtggcctgttccgccgacatggcgacgcagcagccggcgctgcgctacgtgatcttcggtggcgaggcgctggatctgcagagcctgcggccgtggttccagcgcttcggcgatcgccagccgcaactggtgaacatgtacggcatcaccgagaccacggtgcacgtaacctaccgtccggtgagcgaggccgacctggaaggtggcctggtcagtccgattggcgggaccatcccggacctgtcctggtacatcctcgaccgtgacctgaacccggtgccgcgcggcgcggtgggcgagctgtacatcggtcgcgccgggctggcgcgcggctacctgaggcggcccgggttgagtgccacccgcttcgtgccgaacccgttccccggcggcgccggcgagcggctgtaccgtaccggcgacctggcacggttccaggcggatggcaatatcgagtacatcgggcgtatcgaccaccaggtgaaggttcgcggcttccgtatcgaactgggcgagatcgaagcggcgctcgccggtctggccggggtacgcgatgccgtggtgctggcccatgacggagtcggcggcacgcaactggtgggatacgtggtggcggactcggcggaggatgccgagcgtctgcgggagtcgctgcgggagtcgctgaagcggcacctgccggactacatggtgccggcgcacctgatgctgctggagcggatgccgctgacggtcaatggcaagctcgaccggcaggcgttgccgcaaccggatgcgagcctgtcgcaacaggcctatcgagcgcccggtagcgagctggagcagcgcatcgcagcgatctggtcggagatcctgggagtggaacgggtcggcctggacgacaacttcttcgaactgggcggtcattcgttgctggctacccgggtgatttctcgggttcgccaggagcagcagttggacgcaagcctgaaggcgttgttcgagcggccggttctggaagcgttcgcccagggattgactagtccccgtcgacgggcaggccttgagctacgccgagctcaacgcccgcgccaatcgtctggctcactgcctgatagcgcgtggcgtcggtcccgatgtgctggtgggaatcgccgtcgagcgctcgctggacatggtggtcggtctgctggcgatcctcaaggccggtggtgcctatgtgccgctggacccgacctatccgcaggaccgtttgcgtcacatgctcgaggacagcgccgtcggcctgttgctcagccaggagcatttgctgcccgggctgcctttgcacgaagggctggaggtgctctccatcgaccgcctggaacgggacgcatcggtgtctacggatgatccggtggtgaacctgcggccggagaacctggcctatgtgatctacacctccggctccaccggaaaacccaagggcgtggccatcagccatgcggcgcttgcgcagttctcgcgtatcgccagtggttattccgcgctcaccccggaggatcggatattgcagttcgccaccctgagcttcgacggcttcgtcgaacagctctatccggcgctgacccgtggtgcctgcgtggtcctgcgtggcggcgacctctgggataccggtgagctgtatcggcagatagtcgagcagggcgtgacccttgccgacctgcccacggcgtactggaacctgttcctgctcgatgccctggccgagccacggcgttcctacggtgccttgcggcagatccacatcggtggcgaagccatgccactggaggggccgaagctctggcggcaagccggcatgggccgggtgaggttgctcaatacctatggaccgaccgaggccacggtggtgtccagcgtcttcgattgttccgccgagaacgcccgggtgggcaatgccagtcctatcggccaggcgctacccggccgtacgttgctggtgctggatgaacatctcggcctactgcccgtagggccggtaggcgagctttatatcgccagccgtgccgggctggcccgtgcctaccacgatcggcccggcttgaccgccgagcgcttcttgcccgaccccttcggcgaaccgggctcaaggctctaccggaccggcgacctggcgcgccgacgcggtgacggcgtgatcgagtacatggggcgtgccgaccatcaggtgaagatccgcggcttccgcatcgagctgggggaggtcgaagcccgcctcctggacttggagggaatacgcgaagcggcggctcttgcgctggacggtcaactggtggcctacctggtggctgaggggggcgaggacgaaactcgccagccggctttgcgcgagcgtatccgcacagcgctacgggcctcgctaccggactacatggtgccctcgcacctgctgttcctcgagcggatgccgctcagtccaaatggcaagctggaccgtcgggcgctgccgaagccggatgcggccgcgtcgcagcaggcctatcgagcgcccggtagcgagctggagcagcgcatcgcagcgatctgggcggagatcctgggagtggaacgggtcggcctggacgacaacttcttcgaactgggcggtcactcattgttgctgctgatgctcaaggagcggatcggcgatacctgccaggctacgctgagcatcagccaactgatgacccatgccagcgtcgcggaacaggcggcatgcatcgaggggcaggcgcgtgagtcgttgctggtgccgctcaacggcaggcgcgaaggttcgccgctgttcatgttccatccgagtttcggctctgtgcactgttacaagaccctcgccatggcgctgcgggatcgtcatccggtcaagggtgttgtctgccgtgccctgctgggcgctggtcgcgaggtgccggagtgggacgatatggttgcggaatacgccgagcaattgctgcaggagcaccccgaaggggttttcaacctggcgggatggtcgctcggcggcaacctggcgatggatgtcgcggcccggctggagcagcgtgggcggcaggtggctttcgtcggctggatcgatgcaccggcaccggtcagggtcgaagcgttctggaacgagatcgggccgacgccggaggcagtcccgaacctatccgtgggcgagatgcgggtggaactgctcggtgtcatgtttccggagcgggccgagcatatcgaacgggcctggtcatcgatctgctccgccacgacggacgatgagcagcgctggacgaggatgagcgactgggcggaagcggagatcggcgccgagttcgcgacactgcgcagcgaaatcgcacagagcaacgaactggaagtgtcctgggagttgaaacagatcctcgacgagcgcctgaaagcgatggattacccgcgtctgacggcgaaggtcagcctctggtgggccgcgcgcagcaccaatgccatccagcggagcgcggtggagcgctcgatggccgaggcgatcggggctgagcgtgtcgaaccggtgcgggtgctggatacccggcacgacaagatcatcgaccaccctgagtttgtgcagagcttccgggccgccctggagcgtgccgggcgctgagagctcgaattcgtaatcatggtcatagctgtttcctgtgtgaaattgttatccgctcacaattccacacaacatacgagccggaagcataaagtgtaaagcctggggtgcctaatgagtgagctaactcacattaattgcgttgcgctcactgcccgctttccagtcgggaaacctgtcgtgccagctgcattaatgaatcggccaacgcgcggggagaggcggtttgcgtattgggcgctcttccgcttcctcgctcactgactcgctgcgctcggtcgttcggctgcggcgagcggtatcagctcactcaaaggcggtaatacggttatccacagaatcaggggataacgcaggaaagaacatgtgagcaaaaggccagcaaaaggccaggaaccgtaaaaaggccgcgttgctggcgtttttccataggctccgcccccctgacgagcatcacaaaaatcgacgctcaagtcagaggtggcgaaacccgacaggactataaagataccaggcgtttccccctggaagctccctcgtgcgctctcctgttccgaccctgccgcttaccggatacctgtccgcctttctcccttcgggaagcgtggcgctttctcatagctcacgctgtaggtatctcagttcggtgtaggtcgttcgctccaagctgggctgtgtgcacgaaccccccgttcagcccgaccgctgcgccttatccggtaactatcgtcttgagtccaacccggtaagacacgacttatcgccactggcagcagccactggtaacaggattagcagagcgaggtatgtaggcggtgctacagagttcttgaagtggtggcctaactacggctacactagaaggacagtatttggtatctgcgctctgctgaagccagttaccttcggaaaaagagttggtagctcttgatccggcaaacaaaccaccgctggtagcggtggtttttttgtttgcaagcagcagattacgcgcagaaaaaaaggatctcaagaagatcctttgatcttttctacggggtctgacgctcagtggaacgaaaactcacgttaagggattttggtcatgagattatcaaaaaggatcttcacctagatccttttaaattaaaaatgaagttttaaatcaatctaaagtatatatgagtaaacttggtctgacagttaccaatgcttaatcagtgaggcacctatctcagcgatctgtctatttcgttcatccatagttgcctgactccccgtcgtgtagataactacgatacgggagggcttaccatctggccccagtgctgcaatgataccgcgagacccacgctcaccggctccagatttatcagcaataaaccagccagccggaagggccgagcgcagaagtggtcctgcaactttatccgcctccatccagtctattaattgttgccgggaagctagagtaagtagttcgccagttaatagtttgcgcaacgttgttgccattgctacaggcatcgtggtgtcacgctcgtcgtttggtatggcttcattcagctccggttcccaacgatcaaggcgagttacatgatcccccatgttgtgcaaaaaagcggttagctccttcggtcctccgatcgttgtcagaagtaagttggccgcagtgttatcactcatggttatggcagcactgcataattctcttactgtcatgccatccgtaagatgcttttctgtgactggtgagtactcaaccaagtcattctgagaatagtgtatgcggcgaccgagttgctcttgcccggcgtcaatacgggataataccgcgccacatagcagaactttaaaagtgctcatcattggaaaacgttcttcggggcgaaaactctcaaggatcttaccgctgttgagatccagttcgatgtaacccactcgtgcacccaactgatcttcagcatcttttactttcaccagcgtttctgggtgagcaaaaacaggaaggcaaaatgccgcaaaaaagggaataagggcgacacggaaatgttgaatactcatactcttcctttttcaatattattgaagcatttatcagggttattgtctcatgagcggatacatatttgaatgtatttagaaaaataaacaaataggggttccgcgcacatttccccgaaaagtgccacctgacgtctaagaaaccattattatcatgacattaacctataaaaataggcgtatcacgaggccctttcgtc

SEQ ID NO: 6 - DNA, 11885 bp, Artificial Sequence
  Description of Artificial Sequence: Synthetic polynucleotide
tcgcgcgtttcggtgatgacggtgaaaacctctgacacatgcagctcccggagacggtcacagcttgtctgtaagcggatgccgggagcagacaagcccgtcagggcgcgtcagcgggtgttggcgggtgtcggggctggcttaactatgcggcatcagagcagattgtactgagagtgcaccatacgaattggccgcggcgttgtgacaatttaccgaacaactccgcggccgggaagccgatctcggcttgaacgaattgttaggtggcggtacttgggtcgatatcaaagtgcatcacttcttcccgtatgcccaactttgtatagagagccactgcgggatcgtcaccgtaatctgcttgcacgtagatcacataagcaccaagcgcgttggcctcatgcttgaggagattgatgagcgcggtggcaatgccctgcctccggtgctcgccggagactgcgagatcatagatatagatctcactacgcggctgctcaaacctgggcagaacgtaagccgcgagagcgccaacaaccgcttcttggtcgaaggcagcaagcgcgatgaatgtcttactacggagcaagttcccgaggtaatcggagtccggctgatgttgggagtaggtggctacgtctccgaactcacgaccgaaaagatcaagagcagcccgcatggatttgacttggtcagggccgagcctacatgtgcgaatgatgcccatacttgagccacctaactttgttttagggcgactgccctgctgcgtaacatcgttgctgctgcgtaacatcgttgctgctccataacatcaaacatcgacccacggcgtaacgcgcttgctgcttggatgcccgaggcatagactgtacaaaaaaacagtcataacaagccatgaaaaccgccactgcgccgttaccaccgctgcgttcggtcaaggttctggaccagttgcgtgagcgcatacgctacttgcattacagtttacgaaccgaacaggcttatgtcaattcgcctctcaggcgccgctggtgccgctggttggacgccaagggtgaatccgcctcgataccctgattactcgcttcctgcgccctctcaggcggcgataggggactggtaaaacggggattgcccagacgcctcccccgccccttcaggggcacaaatgcggccccaacggggccacgtagtggtgcgttttttgcgtttccacccttttcttccttttcccttttaaaccttttaggacgtctacaggccacgtaatccgtggcctgtagagtttaaaaagggacggatttgttgccattaagggacggatttgttgttaagaagggacggatttgttgttgtaaagggacggatttgttgtattgtgggacgcagatacagtgtccccttatacacaaggaatgtcgaacgtggcctcacccccaatggtttacaaaagcaatgccctggtcgaggccgcgtatcgcctcagtgttcaggaacagcggatcgttctggcctgtattagccaggtgaagaggagcgagcctgtcaccgatgaagtgatgtattcagtgacggcggaggacatagcgacgatggcgggtgtccctatcgaatcttcctacaaccagctcaaagaagcggccctgcgcctgaaacggcgggaagtccggttaacccaagagcccaatggcaaggggaaaagaccgagtgtgatgattaccggctgggtgcaaacaatcatctaccgggagggtgagggccgtgtagaactcaggttcaccaaagacatgctgccgtacctgacggaactcaccaaacagttcaccaaatacgccttggctgacgtggccaagatggacagcacccacgcgatcaggctttacgagctgctcatgcaatgggacagcatcggccagcgcgaaatagaaattgaccagctgcgaaagtggtttcaactggaaggccggtatccctcgatcaaggacttcaagttgcgagtgcttgatccagccgtgacgcagatcaacgagcacagcccgctacaggtggagtgggcgcagcgaaagaccgggcgcaaggtcacacatctgttgttcagttttggaccgaagaagcccgccaaggcggtgggtaaggccccagcgaagcgcaaggccgggaagatttcagatgctgagatcgcgaaacaggctcgccctggtgagacatgggaagcggcccgcgctcgactaacccagatgccgctggatctggcctagaggccgtggccaccacggcccggcctgcctttcaggctgcgcaactgttgggaagggcgatcggtgcgggcctcttcgctattacgccagctggcgaaagggggatgtgctgcaaggcgattaagttgggtaacgccagggttttcccagtcacgacgttgtaaaacgacggccagtgccaagcttgcatgcctgcataatgtgcctgtcaaatggacgaagcagggattctgcaaaccctatgctactccgtcaagccgtcaattgtctgattcgttaccaattatgacaacttgacggctacatcattcactttttcttcacaaccggcacggaactcgctcgggctggccccggtgcattttttaaatacccgcgagaaatagagttgatcgtcaaaaccaacattgcgaccgacggtggcgataggcatccgggtggtgctcaaaagcagcttcgcctggctgatacgttggtcctcgcgccagcttaagacgctaatccctaactgctggcggaaaagatgtgacagacgcgacggcgacaagcaaacatgctgtgcgacgctggcgatatcaaaattgctgtctgccaggtgatcgctgatgtactgacaagcctcgcgtacccgattatccatcggtggatggagcgactcgttaatcgcttccatgcgccgcagtaacaattgctcaagcagatttatcgccagcagctccgaatagcgcccttccccttgcccggcgttaatgatttgcccaaacaggtcgctgaaatgcggctggtgcgcttcatccgggcgaaagaaccccgtattggcaaatattgacggccagttaagccattcatgccagtaggcgcgcggacgaaagtaaacccactggtgataccattcgcgagcctccggatgacgaccgtagtgatgaatctctcctggcgggaacagcaaaatatcacccggtcggcaaacaaattctcgtccctgatttttcaccaccccctgaccgcgaatggtgagattgagaatataacctttcattcccagcggtcggtcgataaaaaaatcgagataaccgttggcctcaatcggcgttaaacccgccaccagatgggcattaaacgagtatcccggcagcaggggatcattttgcgcttcagccatacttttcatactcccgccattcagagaagaaaccaattgtccatattgcatcagacattgccgtcactgcgtcttttactggctcttctcgctaaccaaaccggtaaccccgcttattaaaagcattctgtaacaaagcgggaccaaagccatgacaaaaacgcgtaacaaaagtgtctataatcacggcagaaaagtccacattgattatttgcacggcgtcacactttgctatgccatagcatttttatccataagattagcggatcctacctgacgctttttatcgcaactctctactgtttctccatacccgtttttttgggctagcgaattcccatatgcaagcactcatagagaaggtgggctccctttccccccaggaaaggaaggcattggctgtcctgctcaagcagcaaggtgtcaatctcttcgagatcgcgccagtgttcaagcgccaggacggcgagcccctgcggctctcctatgcccaggagcgacagtggtttctctggcaactggagccggaaagcgcggcctaccatatcccgagtgtcttgcgtctacgtgggcggctggacctggatgccctgcaacgcagcttcgacagcctggttgcgcggcacgagaccctacgcacccgttttcgcctcgacggcgacgaggcgcgccaggagatcgccgcatccatggcattgccgttggatatcgtcgcgttggggccgctcgaggagggcgccctcgctcggcaggtcgagacgacgatcgcgcggccgttcgacctggagcgtgggccgctgctgcgggtgagcctgttgcggctggccgaggacgaccatgtgctggtgctggtccagcatcacatcgtgtccgacggttggtcgatgcaggtgatggtcgaggaactggtccagctctatgccgcctatagtcgagggctcgaggtagcgctgccggctttgccgatccagtacgcggactacgccctgtggcagcgcagctggatggaggccggggaaaaggagcgccagttggcgtactggaccggcctgctgggcggcgagcagccggtgctggagttgccgttcgaccggccgcgcccggttcggcaaagccatcgtggtgcccagttcatcctggaactggatattgatctgtcccaggcgctcaggcgcgtggcccagcaggagggggctactgccttcgccctgttgctggcttcgttccaggcgctgctgtatcgctacagcgggcaggcggatatccgtgtcggcgtgccgatcgccaatcgcaaccgcgtggagaccgagcggctgatcggcttcttcgtcaacacccaggtgctcaaggccgacctggacggtcggatgggcttcgacgagctgctggcccaggcccgccaacgcgcgctggaggcccaggcgcaccaggacctgccgttcgagcaactggtggaggccttgcagccggagcgcagtcttagccacaacccgctgttccaggtgctgttcaactaccagagcgaagcccgtggcaacggccaggcattccgcttcgacgagttacagatggaaagcgtgcagttcgacagccggacggcgcagttcgacttgacgttggacctgacggacgaagagcagcgtttttgcgccgttttcgactacgccaccgacctgttcgacgcctccaccgtggaacgcctggccggccattggcgcaacctgttgcgcggcatcgtcgccaacccacgacagcggctcggcgagttgccgctgctggatgcgccggagcgccggcagaccctctccgaatggaacccggcccagcgcgagtgcgcggtgcagggcaccttgcagcagcgtttcgaggaacaggcgcggcaacggccacaggcggttgcgctgatcctcgacgaacaacggttgagctacggcgaactgaatgcgcgggccaatcgcctggcgcactgcctgatcgcccgtggcgttggcgcggacgtgccggtcgggctggcgctggagcgttcgctggacatgctggtcggcttgctggcgatcctcaaggccggcggcgcctacctgccgttggacccggcggcgccagaggagcgcctggcgcatatcctcgacgacagtggggtacggctgctgctgacccaggggcatctgctcgagcgcctgccacggcaggcgggggtggaggtgctggccatcgacggactggtgctggacggctacgccgagagcgatccgctcccgacgctatcggcggacaacctggcctacgtgatctatacctcgggctcgaccggcaagcccaagggcacattgctcacccaccgcaacgcgctgcgcctgttcagcgccaccgaggcctggttcggcttcgacgagcgggacgtgtggacattgttccattcctacgccttcgatttctcggtctgggaaatcttcggcgcgctgctctatggcgggtgcctggtgattgtgccgcaatgggtgagccgttcgccggaagacttctaccgtctgctgtgccgcgaaggcgtgacggtgctcaaccagacgccgtcggcgttcaagcaactgatggcggtggcctgttccgccgacatggcgacgcagcagccggcgctgcgctacgtgatcttcggtggcgaggcgctggatctgcagagcctgcggccgtggttccagcgcttcggcgatcgccagccgcaactggtgaacatgtacggcatcaccgagaccacggtgcacgtaacctaccgtccggtgagcgaggccgacctggaaggtggcctggtcagtccgattggcgggaccatcccggacctgtcctggtacatcctcgaccgtgacctgaacccggtgccgcgcggcgcggtgggcgagctgtacatcggtcgcgccgggctggcgcgcggctacctgaggcggcccgggttgagtgccacccgcttcgtgccgaacccgttccccggcggcgccggcgagcggctgtaccgtaccggcgacctggcacggttccaggcggatggcaatatcgagtacatcgggcgtatcgaccaccaggtgaaggttcgcggcttccgtatcgaactgggcgagatcgaagcggcgctcgccggtctggccggggtacgcgatgccgtggtgctggcccatgacggagtcggcggcacgcaactggtgggatacgtggtggcggactcggcggaggatgccgagcgtctgcgggagtcgctgcgggagtcgctgaagcggcacctgccggactacatggtgccggcgcacctgatgctgctggagcggatgccgctgacggtcaatggcaagctcgaccggcaggcgttgccgcaaccggatgcgagcctgtcgcaacaggcctatcgagcgcccggtagcgagctggagcagcgcatcgcagcgatctggtcggagatcctgggagtggaacgggtcggcctggacgacaacttcttcgaactgggcggtcattcgttgctggctacccgggtgatttctcgggttcgccaggagcagcagttggacgcaagcctgaaggcgttgttcgagcggccggttctggaagcgttcgcccagggattgactagtccccgtcgacgaacaacggttgagctacggcgaactgaatgcgcgggccaatcgcctggcgcactgcctgatcgctcgcggcgttggcgcggacgtgccggtcgggctggcgctggagcgttcgctggacatgctggtcggcttgctggcgatcctcaaggccggcggcgcctacctgccgttggacccggcggcgccagaggagcgcctggcgcatatcctcgacgacagtggggtacggctgctgctgacccaggggcatctgctcgagcgcctgccgcggcaggcgggggtggaggtgctggccatcgacggactggtgctggacggctacgccgagagcgatccgctcccgacgctatcggcggacaacctggcctacgtgatctatacctcgggctcgaccggcaagcccaagggcacgttgctcacccaccgcaacgcgctgcgcctgttcagcgccaccgaggcctggttcggcttcgacgagcgggacgtgtggacgttgttccattcctacgccttcgatttctcggtctgggaaatcttcggcgcgctgctctatggcgggcgcctggtgatcgtgccgcaatgggtgagccgttcgccggaagacttctaccgtctgctgtgccgcgaaggcgtgacggtgctcaaccagacgccgtcggcgttcaagcaactgatggcggtggcctgttccgccgacatggcgacgcagcagccggcgctgcgctacgtgatcttcggtggcgaggcgctggatctgcagagcctgcggccgtggttccagcgctttggcgatcgccagccgcaactggtgaacatgtacggcatcaccgagaccacggtacacgtaacctaccgtccggtgagcgaagccgacctgaagggtggcctggtcagtccgatcggcgggaccatcccggacctgtcctggtacatcctcgaccgtgacctgaacccggtgccgcgcggcgcggtgggcgagctgtacatcggtcgcgccggtctggcgcgcggctacctgaggcggcccgggttgagtgccacccgcttcgtgccgaacccgttccccggcggtgccggcgagcggctgtaccgtaccggcgacctggcacggttccaggcggatggcaatatcgagtacatcgggcgtatcgaccaccaggtgaaggttcgcggcttccgtatcgaactgggtgagatcgaagcggcgctcgccggtctggccggggtacgcgatgccgtggtgctggcccatgacggggtcggcggcacgcaactggtgggatacgtggtggcggactcggcggaggatgccgagcgtctgcgggagtcgctgcgggagtcgctgaagcggcacctgccggactacatggtgccggcgcacctgatgctgctggagcggatgccgctgacggtcaatggcaagctcgaccggcaggcgttgccgcaaccggatgcggccgcgtcgcagcaggcctatcgagcgcccggtagcgagctggagcagcgcatcgcagcgatctgggcggagatcctgggagtggaacgggtcggcctggacgacaacttcttcgaactgggcggtcactcattgttgctgctgatgctcaaggagcggatcggcgatacctgccaggctacgctgagcatcagccaactgatgacccatgccagcgtcgcggaacaggcggcatgcatcgaggggcaggcgcgtgagtcgttgctggtgccgctcaacggcaggcgcgaaggttcgccgctgttcatgttccatccgagtttcggctctgtgcactgttacaagaccctcgccatggcgctgcgggatcgtcatccggtcaagggtgttgtctgccgtgccctgctgggcgctggtcgcgaggtgccggagtgggacgatatggttgcggaatacgccgagcaattgctgcaggagcaccccgaaggggttttcaacctggcgggatggtcgctcggcggcaacctggcgatggatgtcgcggcccggctggagcagcgtgggcggcaggtggctttcgtcggctggatcgatgcaccggcaccggtcagggtcgaagcgttctggaacgagatcgggccgacgccggaggcagtcccgaacctatccgtgggcgagatgcgggtggaactgctcggtgtcatgtttccggagcgggccgagcatatcgaacgggcctggtcatcgatctgctccgccacgacggacgatgagcagcgctggacgaggatgagcgactgggcggaagcggagatcggcgccgagttcgcgacactgcgcagcgaaatcgcacagagcaacgaactggaagtgtcctgggagttgaaacagatcctcgacgagcgcctgaaagcgatggattacccgcgtctgacggcgaaggtcagcctctggtgggccgcgcgcagcaccaatgccatccagcggagcgcggtggagcgctcgatggccgaggcgatcggggctgagcgtgtcgaaccggtgcgggtgctggatacccggcacgacaagatcatcgaccaccctgagtttgtgcagagcttccgggccgccctggagcgtgccgggcgctgagagctcgaattcgtaatcatggtcatagctgtttcctgtgtgaaattgttatccgctcacaattccacacaacatacgagccggaagcataaagtgtaaagcctggggtgcctaatgagtgagctaactcacattaattgcgttgcgctcactgcccgctttccagtcgggaaacctgtcgtgccagctgcattaatgaatcggccaacgcgcggggagaggcggtttgcgtattgggcgctcttccgcttcctcgctcactgactcgctgcgctcggtcgttcggctgcggcgagcggtatcagctcactcaaaggcggtaatacggttatccacagaatcaggggataacgcaggaaagaacatgtgagcaaaaggccagcaaaaggccaggaaccgtaaaaaggccgcgttgctggcgtttttccataggctccgcccccctgacgagcatcacaaaaatcgacgctcaagtcagaggtggcgaaacccgacaggactataaagataccaggcgtttccccctggaagctccctcgtgcgctctcctgttccgaccctgccgcttaccggatacctgtccgcctttctcccttcgggaagcgtggcgctttctcatagctcacgctgtaggtatctcagttcggtgtaggtcgttcgctccaagctgggctgtgtgcacgaaccccccgttcagcccgaccgctgcgccttatccggtaactatcgtcttgagtccaacccggtaagacacgacttatcgccactggcagcagccactggtaacaggattagcagagcgaggtatgtaggcggtgctacagagttcttgaagtggtggcctaactacggctacactagaaggacagtatttggtatctgcgctctgctgaagccagttaccttcggaaaaagagttggtagctcttgatccggcaaacaaaccaccgctggtagcggtggtttttttgtttgcaagcagcagattacgcgcagaaaaaaaggatctcaagaagatcctttgatcttttctacggggtctgacgctcagtggaacgaaaactcacgttaagggattttggtcatgagattatcaaaaaggatcttcacctagatccttttaaattaaaaatgaagttttaaatcaatctaaagtatatatgagtaaacttggtctgacagttaccaatgcttaatcagtgaggcacctatctcagcgatctgtctatttcgttcatccatagttgcctgactccccgtcgtgtagataactacgatacgggagggcttaccatctggccccagtgctgcaatgataccgcgagacccacgctcaccggctccagatttatcagcaataaaccagccagccggaagggccgagcgcagaagtggtcctgcaactttatccgcctccatccagtctattaattgttgccgggaagctagagtaagtagttcgccagttaatagtttgcgcaacgttgttgccattgctacaggcatcgtggtgtcacgctcgtcgtttggtatggcttcattcagctccggttcccaacgatcaaggcgagttacatgatcccccatgttgtgcaaaaaagcggttagctccttcggtcctccgatcgttgtcagaagtaagttggccgcagtgttatcactcatggttatggcagcactgcataattctcttactgtcatgccatccgtaagatgcttttctgtgactggtgagtactcaaccaagtcattctgagaatagtgtatgcggcgaccgagttgctcttgcccggcgtcaatacgggataataccgcgccacatagcagaactttaaaagtgctcatcattggaaaacgttcttcggggcgaaaactctcaaggatcttaccgctgttgagatccagttcgatgtaacccactcgtgcacccaactgatcttcagcatcttttactttcaccagcgtttctgggtgagcaaaaacaggaaggcaaaatgccgcaaaaaagggaataagggcgacacggaaatgttgaatactcatactcttcctttttcaatattattgaagcatttatcagggttattgtctcatgagcggatacatatttgaatgtatttagaaaaataaacaaataggggttccgcgcacatttccccgaaaagtgccacctgacgtctaagaaaccattattatcatgacattaacctataaaaataggcgtatcacgaggccctttcgtc

SEQ ID NO: 7 - DNA, 12904 bp, Artificial Sequence
  Description of Artificial Sequence: Synthetic polynucleotide
tcgcgcgtttcggtgatgacggtgaaaacctctgacacatgcagctcccggagacggtcacagcttgtctgtaagcggatgccgggagcagacaagcccgtcagggcgcgtcagcgggtgttggcgggtgtcggggctggcttaactatgcggcatcagagcagattgtactgagagtgcaccatacgaattggccgcggcgttgtgacaatttaccgaacaactccgcggccgggaagccgatctcggcttgaacgaattgttaggtggcggtacttgggtcgatatcaaagtgcatcacttcttcccgtatgcccaactttgtatagagagccactgcgggatcgtcaccgtaatctgcttgcacgtagatcacataagcaccaagcgcgttggcctcatgcttgaggagattgatgagcgcggtggcaatgccctgcctccggtgctcgccggagactgcgagatcatagatatagatctcactacgcggctgctcaaacctgggcagaacgtaagccgcgagagcgccaacaaccgcttcttggtcgaaggcagcaagcgcgatgaatgtcttactacggagcaagttcccgaggtaatcggagtccggctgatgttgggagtaggtggctacgtctccgaactcacgaccgaaaagatcaagagcagcccgcatggatttgacttggtcagggccgagcctacatgtgcgaatgatgcccatacttgagccacctaactttgttttagggcgactgccctgctgcgtaacatcgttgctgctgcgtaacatcgttgctgctccataacatcaaacatcgacccacggcgtaacgcgcttgctgcttggatgcccgaggcatagactgtacaaaaaaacagtcataacaagccatgaaaaccgccactgcgccgttaccaccgctgcgttcggtcaaggttctggaccagttgcgtgagcgcatacgctacttgcattacagtttacgaaccgaacaggcttatgtcaattcgcctctcaggcgccgctggtgccgctggttggacgccaagggtgaatccgcctcgataccctgattactcgcttcctgcgccctctcaggcggcgataggggactggtaaaacggggattgcccagacgcctcccccgccccttcaggggcacaaatgcggccccaacggggccacgtagtggtgcgttttttgcgtttccacccttttcttccttttcccttttaaaccttttaggacgtctacaggccacgtaatccgtggcctgtagagtttaaaaagggacggatttgttgccattaagggacggatttgttgttaagaagggacggatttgttgttgtaaagggacggatttgttgtattgtgggacgcagatacagtgtccccttatacacaaggaatgtcgaacgtggcctcacccccaatggtttacaaaagcaatgccctggtcgaggccgcgtatcgcctcagtgttcaggaacagcggatcgttctggcctgtattagccaggtgaagaggagcgagcctgtcaccgatgaagtgatgtattcagtgacggcggaggacatagcgacgatggcgggtgtccctatcgaatcttcctacaaccagctcaaagaagcggccctgcgcctgaaacggcgggaagtccggttaacccaagagcccaatggcaaggggaaaagaccgagtgtgatgattaccggctgggtgcaaacaatcatctaccgggagggtgagggccgtgtagaactcaggttcaccaaagacatgctgccgtacctgacggaactcaccaaacagttcaccaaatacgccttggctgacgtggccaagatggacagcacccacgcgatcaggctttacgagctgctcatgcaatgggacagcatcggccagcgcgaaatagaaattgaccagctgcgaaagtggtttcaactggaaggccggtatccctcgatcaaggacttcaagttgcgagtgcttgatccagccgtgacgcagatcaacgagcacagcccgctacaggtggagtgggcgcagcgaaagaccgggcgcaaggtcacacatctgttgttcagttttggaccgaagaagcccgccaaggcggtgggtaaggccccagcgaagcgcaaggccgggaagatttcagatgctgagatcgcgaaacaggctcgccctggtgagacatgggaagcggcccgcgctcgactaacccagatgccgctggatctggcctagaggccgtggccaccacggcccggcctgcctttcaggctgcgcaactgttgggaagggcgatcggtgcgggcctcttcgctattacgccagctggcgaaagggggatgtgctgcaaggcgattaagttgggtaacgccagggttttcccagtcacgacgttgtaaaacgacggccagtgccaagcttgcatgcctgcataatgtgcctgtcaaatggacgaagcagggattctgcaaaccctatgctactccgtcaagccgtcaattgtctgattcgttaccaattatgacaacttgacggctacatcattcactttttcttcacaaccggcacggaactcgctcgggctggccccggtgcattttttaaatacccgcgagaaatagagttgatcgtcaaaaccaacattgcgaccgacggtggcgataggcatccgggtggtgctcaaaagcagcttcgcctggctgatacgttggtcctcgcgccagcttaagacgctaatccctaactgctggcggaaaagatgtgacagacgcgacggcgacaagcaaacatgctgtgcgacgctggcgatatcaaaattgctgtctgccaggtgatcgctgatgtactgacaagcctcgcgtacccgattatccatcggtggatggagcgactcgttaatcgcttccatgcgccgcagtaacaattgctcaagcagatttatcgccagcagctccgaatagcgcccttccccttgcccggcgttaatgatttgcccaaacaggtcgctgaaatgcggctggtgcgcttcatccgggcgaaagaaccccgtattggcaaatattgacggccagttaagccattcatgccagtaggcgcgcggacgaaagtaaacccactggtgataccattcgcgagcctccggatgacgaccgtagtgatgaatctctcctggcgggaacagcaaaatatcacccggtcggcaaacaaattctcgtccctgatttttcaccaccccctgaccgcgaatggtgagattgagaatataacctttcattcccagcggtcggtcgataaaaaaatcgagataaccgttggcctcaatcggcgttaaacccgccaccagatgggcattaaacgagtatcccggcagcaggggatcattttgcgcttcagccatacttttcatactcccgccattcagagaagaaaccaattgtccatattgcatcagacattgccgtcactgcgtcttttactggctcttctcgctaaccaaaccggtaaccccgcttattaaaagcattctgtaacaaagcgggaccaaagccatgacaaaaacgcgtaacaaaagtgtctataatcacggcagaaaagtccacattgattatttgcacggcgtcacactttgctatgccatagcatttttatccataagattagcggatcctacctgacgctttttatcgcaactctctactgtttctccatacccgtttttttgggctagcgaattcccatatgcaagcactcatagagaaggtgggctccctttccccccaggaaaggaaggcattggctgtcctgctcaagcagcaaggtgtcaatctcttcgagatcgcgccagtgttcaagcgccaggacggcgagcccctgcggctctcctatgcccaggagcgacagtggtttctctggcaactggagccggaaagcgcggcctaccatatcccgagtgtcttgcgtctacgtgggcggctggacctggatgccctgcaacgcagcttcgacagcctggttgcgcggcacgagaccctacgcacccgttttcgcctcgacggcgacgaggcgcgccaggagatcgccgcatccatggcattgccgttggatatcgtcgcgttggggccgctcgaggagggcgccctcgctcggcaggtcgagacgacgatcgcgcggccgttcgacctggagcgtgggccgctgctgcgggtgagcctgttgcggctggccgaggacgaccatgtgctggtgctggtccagcatcacatcgtgtccgacggttggtcgatgcaggtgatggtcgaggaactggtccagctctatgccgcctatagtcgagggctcgaggtagcgctgccggctttgccgatccagtacgcggactacgccctgtggcagcgcagctggatggaggccggggaaaaggagcgccagttggcgtactggaccggcctgctgggcggcgagcagccggtgctggagttgccgttcgaccggccgcgcccggttcggcaaagccatcgtggtgcccagttcatcctggaactggatattgatctgtcccaggcgctcaggcgcgtggcccagcaggagggggctactgccttcgccctgttgctggcttcgttccaggcgctgctgtatcgctacagcgggcaggcggatatccgtgtcggcgtgccgatcgccaatcgcaaccgcgtggagaccgagcggctgatcggcttcttcgtcaacacccaggtgctcaaggccgacctggacggtcggatgggcttcgacgagctgctggcccaggcccgccaacgcgcgctggaggcccaggcgcaccaggacctgccgttcgagcaactggtggaggccttgcagccggagcgcagtcttagccacaacccgctgttccaggtgctgttcaactaccagagcgaagcccgtggcaacggccaggcattccgcttcgacgagttacagatggaaagcgtgcagttcgacagccggacggcgcagttcgacttgacgttggacctgacggacgaagagcagcgtttttgcgccgttttcgactacgccaccgacctgttcgacgcctccaccgtggaacgcctggccggccattggcgcaacctgttgcgcggcatcgtcgccaacccacgacagcggctcggcgagttgccgctgctggatgcgccggagcgccggcagaccctctccgaatggaacccggcccagcgcgagtgcgcggtgcagggcaccttgcagcagcgtttcgaggaacaggcgcggcaacggccacaggcggttgcgctgatcctcgacgaacaacggttgagctacggcgaactgaatgcgcgggccaatcgcctggcgcactgcctgatcgcccgtggcgttggcgcggacgtgccggtcgggctggcgctggagcgttcgctggacatgctggtcggcttgctggcgatcctcaaggccggcggcgcctacctgccgttggacccggcggcgccagaggagcgcctggcgcatatcctcgacgacagtggggtacggctgctgctgacccaggggcatctgctcgagcgcctgccacggcaggcgggggtggaggtgctggccatcgacggactggtgctggacggctacgccgagagcgatccgctcccgacgctatcggcggacaacctggcctacgtgatctatacctcgggctcgaccggcaagcccaagggcacattgctcacccaccgcaacgcgctgcgcctgttcagcgccaccgaggcctggttcggcttcgacgagcgggacgtgtggacattgttccattcctacgccttcgatttctcggtctgggaaatcttcggcgcgctgctctatggcgggtgcctggtgattgtgccgcaatgggtgagccgttcgccggaagacttctaccgtctgctgtgccgcgaaggcgtgacggtgctcaaccagacgccgtcggcgttcaagcaactgatggcggtggcctgttccgccgacatggcgacgcagcagccggcgctgcgctacgtgatcttcggtggcgaggcgctggatctgcagagcctgcggccgtggttccagcgcttcggcgatcgccagccgcaactggtgaacatgtacggcatcaccgagaccacggtgcacgtaacctaccgtccggtgagcgaggccgacctggaaggtggcctggtcagtccgattggcgggaccatcccggacctgtcctggtacatcctcgaccgtgacctgaacccggtgccgcgcggcgcggtgggcgagctgtacatcggtcgcgccgggctggcgcgcggctacctgaggcggcccgggttgagtgccacccgcttcgtgccgaacccgttccccggcggcgccggcgagcggctgtaccgtaccggcgacctggcacggttccaggcggatggcaatatcgagtacatcgggcgtatcgaccaccaggtgaaggttcgcggcttccgtatcgaactgggcgagatcgaagcggcgctcgccggtctggccggggtacgcgatgccgtggtgctggcccatgacggagtcggcggcacgcaactggtgggatacgtggtggcggactcggcggaggatgccgagcgtctgcgggagtcgctgcgggagtcgctgaagcggcacctgccggactacatggtgccggcgcacctgatgctgctggagcggatgccgctgacggtcaatggcaagctcgaccggcaggcgttgccgcaaccggatgcgagcctgtcgcaacaggcctatcgagcgcccggtagcgagctggagcagcgcatcgcagcgatctggtcggagatcctgggagtggaacgggtcggcctggacgacaacttcttcgaactgggcggtcattcgttgctggctacccgggtgatttctcgggttcgccaggagcagcagttggacgcaagcctgaaggcgttgttcgagcggccggttctggaagcgttcgcccagggattgactagaacgacggatgcggtctcgacgataccgcttgccgatcggcagcaaccgttggcactgtccttcgctcaggagcgtcagtggttcctctggcaactggagccggaaagcgcggcctaccatattccgagtgccttgcgcctacgcgggcggctggacgtggatgccttgcaacgcagcttcgacagcctggtcgcgcggcatgaaaccttgcgtacccgcttccggctggagggagggcgttcgtaccagcaggtacaacctgcggttagcgtttccatcgagcgggaacagttcggtgaagaaggcctgatcgaacggatacaggccatcgttgtgcagccattcgacctggaacgggggccgctgctgcgggtgaacctgttgcaactggccgaggacgaccatgtactggtgctggtccagcaccacatcgtgtccgatggttggtcgatgcaggtgatggtcgaggaactggtccagctctatgccgcctatagccaagggctcgacgtggtgttgccagccctgccgatccagtacgcggactacgccctgtggcagcgcagctggatggaggcgggggaaaaggagcgccagttggcgtactggaccggcctgctgggcggcgagcagccggtgctggagttgccgttcgatcggccgcgtccggcccggcagagccatcgtggcgcgcagttgggtttcgagctatcgcgggaactggtcgaggccgtgagagccttggcccagcgtgaaggcgccagtagtttcatgctgttgctggcctcgttccaggcgctgttgtatcgctacagcgggcaggcggatatccgtgtcggtgtgccgatcgccaatcgcaaccgcgtggagaccgagcggctgatcggcttcttcgtcaacacccaggtgctcaaggccgacctggacggtcggatgggcttcgacgagctgctggcccaggcccgccaacgcgcgctggaggcccaggcgcaccaggacctgccgttcgagcaactagtgggggtcgacgaacaacggttgagctacggcgaactgaatgcgcgggccaatcgcctggcgcactgcctgatcgctcgcggcgttggcgcggacgtgccggtcgggctggcgctggagcgttcgctggacatgctggtcggcttgctggcgatcctcaaggccggcggcgcctacctgccgttggacccggcggcgccagaggagcgcctggcgcatatcctcgacgacagtggggtacggctgctgctgacccaggggcatctgctcgagcgcctgccgcggcaggcgggggtggaggtgctggccatcgacggactggtgctggacggctacgccgagagcgatccgctcccgacgctatcggcggacaacctggcctacgtgatctatacctcgggctcgaccggcaagcccaagggcacgttgctcacccaccgcaacgcgctgcgcctgttcagcgccaccgaggcctggttcggcttcgacgagcgggacgtgtggacgttgttccattcctacgccttcgatttctcggtctgggaaatcttcggcgcgctgctctatggcgggcgcctggtgatcgtgccgcaatgggtgagccgttcgccggaagacttctaccgtctgctgtgccgcgaaggcgtgacggtgctcaaccagacgccgtcggcgttcaagcaactgatggcggtggcctgttccgccgacatggcgacgcagcagccggcgctgcgctacgtgatcttcggtggcgaggcgctggatctgcagagcctgcggccgtggttccagcgctttggcgatcgccagccgcaactggtgaacatgtacggcatcaccgagaccacggtacacgtaacctaccgtccggtgagcgaagccgacctgaagggtggcctggtcagtccgatcggcgggaccatcccggacctgtcctggtacatcctcgaccgtgacctgaacccggtgccgcgcggcgcggtgggcgagctgtacatcggtcgcgccggtctggcgcgcggctacctgaggcggcccgggttgagtgccacccgcttcgtgccgaacccgttccccggcggtgccggcgagcggctgtaccgtaccggcgacctggcacggttccaggcggatggcaatatcgagtacatcgggcgtatcgaccaccaggtgaaggttcgcggcttccgtatcgaactgggtgagatcgaagcggcgctcgccggtctggccggggtacgcgatgccgtggtgctggcccatgacggggtcggcggcacgcaactggtgggatacgtggtggcggactcggcggaggatgccgagcgtctgcgggagtcgctgcgggagtcgctgaagcggcacctgccggactacatggtgccggcgcacctgatgctgctggagcggatgccgctgacggtcaatggcaagctcgaccggcaggcgttgccgcaaccggatgcggccgcgtcgcagcaggcctatcgagcgcccggtagcgagctggagcagcgcatcgcagcgatctgggcggagatcctgggagtggaacgggtcggcctggacgacaacttcttcgaactgggcggtcactcattgttgctgctgatgctcaaggagcggatcggcgatacctgccaggctacgctgagcatcagccaactgatgacccatgccagcgtcgcggaacaggcggcatgcatcgaggggcaggcgcgtgagtcgttgctggtgccgctcaacggcaggcgcgaaggttcgccgctgttcatgttccatccgagtttcggctctgtgcactgttacaagaccctcgccatggcgctgcgggatcgtcatccggtcaagggtgttgtctgccgtgccctgctgggcgctggtcgcgaggtgccggagtgggacgatatggttgcggaatacgccgagcaattgctgcaggagcaccccgaaggggttttcaacctggcgggatggtcgctcggcggcaacctggcgatggatgtcgcggcccggctggagcagcgtgggcggcaggtggctttcgtcggctggatcgatgcaccggcaccggtcagggtcgaagcgttctggaacgagatcgggccgacgccggaggcagtcccgaacctatccgtgggcgagatgcgggtggaactgctcggtgtcatgtttccggagcgggccgagcatatcgaacgggcctggtcatcgatctgctccgccacgacggacgatgagcagcgctggacgaggatgagcgactgggcggaagcggagatcggcgccgagttcgcgacactgcgcagcgaaatcgcacagagcaacgaactggaagtgtcctgggagttgaaacagatcctcgacgagcgcctgaaagcgatggattacccgcgtctgacggcgaaggtcagcctctggtgggccgcgcgcagcaccaatgccatccagcggagcgcggtggagcgctcgatggccgaggcgatcggggctgagcgtgtcgaaccggtgcgggtgctggatacccggcacgacaagatcatcgaccaccctgagtttgtgcagagcttccgggccgccctggagcgtgccgggcgctgagagctcgaattcgtaatcatggtcatagctgtttcctgtgtgaaattgttatccgctcacaattccacacaacatacgagccggaagcataaagtgtaaagcctggggtgcctaatgagtgagctaactcacattaattgcgttgcgctcactgcccgctttccagtcgggaaacctgtcgtgccagctgcattaatgaatcggccaacgcgcggggagaggcggtttgcgtattgggcgctcttccgcttcctcgctcactgactcgctgcgctcggtcgttcggctgcggcgagcggtatcagctcactcaaaggcggtaatacggttatccacagaatcaggggataacgcaggaaagaacatgtgagcaaaaggccagcaaaaggccaggaaccgtaaaaaggccgcgttgctggcgtttttccataggctccgcccccctgacgagcatcacaaaaatcgacgctcaagtcagaggtggcgaaacccgacaggactataaagataccaggcgtttccccctggaagctccctcgtgcgctctcctgttccgaccctgccgcttaccggatacctgtccgcctttctcccttcgggaagcgtggcgctttctcatagctcacgctgtaggtatctcagttcggtgtaggtcgttcgctccaagctgggctgtgtgcacgaaccccccgttcagcccgaccgctgcgccttatccggtaactatcgtcttgagtccaacccggtaagacacgacttatcgccactggcagcagccactggtaacaggattagcagagcgaggtatgtaggcggtgctacagagttcttgaagtggtggcctaactacggctacactagaaggacagtatttggtatctgcgctctgctgaagccagttaccttcggaaaaagagttggtagctcttgatccggcaaacaaaccaccgctggtagcggtggtttttttgtttgcaagcagcagattacgcgcagaaaaaaaggatctcaagaagatcctttgatcttttctacggggtctgacgctcagtggaacgaaaactcacgttaagggattttggtcatgagattatcaaaaaggatcttcacctagatccttttaaattaaaaatgaagttttaaatcaatctaaagtatatatgagtaaacttggtctgacagttaccaatgcttaatcagtgaggcacctatctcagcgatctgtctatttcgttcatccatagttgcctgactccccgtcgtgtagataactacgatacgggagggcttaccatctggccccagtgctgcaatgataccgcgagacccacgctcaccggctccagatttatcagcaataaaccagccagccggaagggccgagcgcagaagtggtcctgcaactttatccgcctccatccagtctattaattgttgccgggaagctagagtaagtagttcgccagttaatagtttgcgcaacgttgttgccattgctacaggcatcgtggtgtcacgctcgtcgtttggtatggcttcattcagctccggttcccaacgatcaaggcgagttacatgatcccccatgttgtgcaaaaaagcggttagctccttcggtcctccgatcgttgtcagaagtaagttggccgcagtgttatcactcatggttatggcagcactgcataattctcttactgtcatgccatccgtaagatgcttttctgtgactggtgagtactcaaccaagtcattctgagaatagtgtatgcggcgaccgagttgctcttgcccggcgtcaatacgggataataccgcgccacatagcagaactttaaaagtgctcatcattggaaaacgttcttcggggcgaaaactctcaaggatcttaccgctgttgagatccagttcgatgtaacccactcgtgcacccaactgatcttcagcatcttttactttcaccagcgtttctgggtgagcaaaaacaggaaggcaaaatgccgcaaaaaagggaataagggcgacacggaaatgttgaatactcatactcttcctttttcaatattattgaagcatttatcagggttattgtctcatgagcggatacatatttgaatgtatttagaaaaataaacaaataggggttccgcgcacatttccccgaaaagtgccacctgacgtctaagaaaccattattatcatgacattaacctataaaaataggcgtatcacgaggccctttcgtc

SEQ ID NO: 8 - DNA, 1491 bp, Artificial Sequence
  Description of Artificial Sequence: Synthetic polynucleotide
tctagattcgcccgcctgccgatcccgcagactcgccaggagatggacaacctgccgctgtcctatgcccaagagcggcagtggttcctctggcagctggagccggagagttccgcctaccacattcctaccgccctgcgcctgcgcggcaggttggacattgcgtccttgcagcgcagcttcgcggcgctcgtcgagcggcacgaaagcctgcgcacgcggatcgcgcggatgggtgatgaatgggtgcaggtcgtctccgccgacgtctcgctggcgctcgaagtcgaagtgcaacggggactcgacgaacagcgattgctggagcgggtcgaggcggagatcgcacgacccttcgatctcgaacagggaccgttactgcgggtgactttgctggaggtggacgccgacgagcatgtgctggtcatggtccagcaccatatcgtctccgacggttggtcgatgcaattgatggtcgaggaactggtccagctctatgccgcctatagccaagggctcgacgtggtgttgccggccctgccgatccagtacgcggactacgccctgtggcagcgcagctggatggaggcgggggaaaaggagcgccagttggcgtactggaccggcctgctgggcggcgagcagccggtgatcgagttgcccctcgatcacccgcggcagccgctgcgcagctatcgtggagcgcaattggacctggagctggagccacacctggcccttgccttgaaacagctggttcagcgcaagggtgtgaccatgttcatgctgttgctggcttccttccaggcgctgttgcatcgctatagcggacaggcggatatccgtgtcggcgtgcctatcgccaaccgtaaccgggttgaaaccgagcggctgatcggtttcttcgtcaacacccaggtgctcaaggccgacatcaatggccggatgggtttcgacgagttgctggcccaggcccgccagcgcgcgctggaggcacaggctcaccaggacctgccgttcgagcaactggtggaggctttgcagccggaacgcagcctcggccacaacccgttgttccaggtcatgttcaatcaccaggccgactctcgttcggccaaccagggcgtgcaactgccaggcctgtcgctggagcggatggagtggcggagcagctccgtggccttcgacctgacgctggacgtgcacgaggccgaggacggtatctgggcatcgttcggctatgccacggatctgttcgaggcctcgaccgtcgagcgcctggctcggcactggcagaatctcctgcgcggcatcgtggccgaaccgggccggccggtcgccgagttgccgctgttgctggacgaggagcgcgattgcctgtcgcgggcctgggcagagaacgccgacgagggtgggttgccgcccctggtccagttgcagatccaggagcaggcccgtctgcgtccgcaggcgcaagcactggcgctcgag

SEQ ID NO: 9 - protein, 497 aa, Artificial Sequence
  Description of Artificial Sequence: Synthetic polypeptide
SRFARLPIPQTRQEMDNLPLSYAQERQWFLWQLEPESSAYHIPTALRLRGRLDIASLQRSFAALVERHESLRTRIARMGDEWVQVVSADVSLALEVEVQRGLDEQRLLERVEAEIARPFDLEQGPLLRVTLLEVDADEHVLVMVQHHIVSDGWSMQLMVEELVQLYAAYSQGLDVVLPALPIQYADYALWQRSWMEAGEKERQLAYWTGLLGGEQPVIELPLDHPRQPLRSYRGAQLDLELEPHLALALKQLVQRKGVTMFMLLLASFQALLHRYSGQADIRVGVPIANRNRVETERLIGFFVNTQVLKADINGRMGFDELLAQARQRALEAQAHQDLPFEQLVEALQPERSLGHNPLFQVMFNHQADSRSANQGVQLPGLSLERMEWRSSSVAFDLTLDVHEAEDGIWASFGYATDLFEASTVERLARHWQNLLRGIVAEPGRPVAELPLLLDEERDCLSRAWAENADEGGLPPLVQLQIQEQARLRPQAQALALE

SEQ ID NO: 10 - DNA, 1485 bp, Artificial Sequence
  Description of Artificial Sequence: Synthetic polynucleotide
tctagaacgacggatgcggtctcgacgataccgcttgccgatcggcagcaaccgttggcactgtccttcgctcaggagcgtcagtggttcctctggcaactggagccggaaagcgcggcctaccatattccgagtgccttgcgcctacgcgggcggctggacgtggatgccttgcaacgcagcttcgacagcctggtcgcgcggcatgaaaccttgcgtacccgcttccggctggagggagggcgttcgtaccagcaggtacaacctgcggttagcgtttccatcgagcgggaacagttcggtgaagaaggcctgatcgaacggatacaggccatcgttgtgcagccattcgacctggaacgggggccgctgctgcgggtgaacctgttgcaactggccgaggacgaccatgtactggtgctggtccagcaccacatcgtgtccgatggttggtcgatgcaggtgatggtcgaggaactggtccagctctatgccgcctatagccaagggctcgacgtggtgttgccagccctgccgatccagtacgcggactacgccctgtggcagcgcagctggatggaggcgggggaaaaggagcgccagttggcgtactggaccggcctgctgggcggcgagcagccggtgctggagttgccgttcgatcggccgcgtccggcccggcagagccatcgtggcgcgcagttgggtttcgagctatcgcgggaactggtcgaggccgtgagagccttggcccagcgtgaaggcgccagtagtttcatgctgttgctggcctcgttccaggcgctgttgtatcgctacagcgggcaggcggatatccgtgtcggtgtgccgatcgccaatcgcaaccgcgtggagaccgagcggctgatcggcttcttcgtcaacacccaggtgctcaaggccgacctggacggtcggatgggcttcgacgagctgctggcccaggcccgccaacgcgcgctggaggcccaggcgcaccaggacctgccgttcgagcaactggtggaagccttgcagccggagcgcaatgccagccacaacccactgttccaggtgctgttcaaccatcagagcgagatacgctcggtgacgcccgaggttcagttggaggacctgcgtctggaaggcctggcctgggacggccagactgcgcagttcgacctgacgctggatattcaggaagacgaaaacggcatctgggcctccttcgactatgccaccgatctgttcgacgcctccaccgtggaacgcctggccggccattggcgcaacctgttgcgcggcatcgtcgccaacccacgacagcggctcggcgagttgccgctgctggatgcgccggagcgccggcagaccctctccgaatggaacccggcccagcgcgagtgcgcggtgcagggcaccttgcagcagcgtttcgaggagcaggcgcggcaacggccacaggcggttgcgctgatcctcgag

SEQ ID NO: 11 - protein, 495 aa, Artificial Sequence
  Description of Artificial Sequence: Synthetic polypeptide
SRTTDAVSTIPLADRQQPLALSFAQERQWFLWQLEPESAAYHIPSALRLRGRLDVDALQRSFDSLVARHETLRTRFRLEGGRSYQQVQPAVSVSIEREQFGEEGLIERIQAIVVQPFDLERGPLLRVNLLQLAEDDHVLVLVQHHIVSDGWSMQVMVEELVQLYAAYSQGLDVVLPALPIQYADYALWQRSWMEAGEKERQLAYWTGLLGGEQPVLELPFDRPRPARQSHRGAQLGFELSRELVEAVRALAQREGASSFMLLLASFQALLYRYSGQADIRVGVPIANRNRVETERLIGFFVNTQVLKADLDGRMGFDELLAQARQRALEAQAHQDLPFEQLVEALQPERNASHNPLFQVLFNHQSEIRSVTPEVQLEDLRLEGLAWDGQTAQFDLTLDIQEDENGIWASFDYATDLFDASTVERLAGHWRNLLRGIVANPRQRLGELPLLDAPERRQTLSEWNPAQRECAVQGTLQQRFEEQARQRPQAVALILE

SEQ ID NO: 12 - DNA, 1491 bp, Artificial Sequence
  Description of Artificial Sequence: Synthetic polynucleotide
tctagattcgcccgcctgccgatcccgcagactcgccaggagatggacaacctgccgctgtcctatgcccaagagcggcagtggttcctctggcagctggagccggagagttccgcctaccacattcctaccgccctgcgcctgcgcggcaggttggacattgcgtccttgcagcgcagcttcgcggcgctcgtcgagcggcacgaaagcctgcgcacgcggatcgcgcggatgggtgatgaatgggtgcaggtcgtctccgccgacgtctcgctggcgctcgaagtcgaagtgcaacggggactcgacgaacagcgattgctggagcgggtcgaggcggagatcgcacgacccttcgatctcgaacagggaccgttactgcgggtgactttgctggaggtggacgccgacgagcatgtgctggtcatggtccagcaccatatcgtctccgacggttggtcgatgcaattgatggtcgaggaactggtccagctctatgccgcctatagccaagggctcgacgtggtgttgccggccctgccgatccagtacgcggactacgccctgtggcagcgcagctggatggaggcgggggaaaaggagcgccagttggcgtactggaccggcctgctgggcggcgagcagccggtgctggagttgccgttcgatcggccgcgtccggcccggcagagccatcgtggcgcgcagttgggtttcgagctatcgcgggaactggtcgaggccgtgagagccttggcccagcgtgaaggcgccagtagtttcatgctgttgctggcctcgttccaggcgctgttgtatcgctacagcgggcaggcggatatccgtgtcggtgtgccgatcgccaatcgcaaccgcgtggagaccgagcggctgatcggcttcttcgtcaacacccaggtgctcaaggccgacctggacggtcggatgggcttcgacgagctgctggcccaggcccgccaacgcgcgctggaggcccaggcgcaccaggacctgccgttcgagcaactggtggaagccttgcagccggagcgcaatgccagccacaacccactgttccaggtgctgttcaaccatcagagcgagatacgctcggtgacgcccgaggttcagttggaggacctgcgtctggaaggcctggcctgggacggccagactgcgcagttcgacctgacgctggatattcaggaagacgaaaacggcatctgggcctccttcgactatgccaccgatctgttcgacgcctccaccgtggaacgcctggccggccattggcgcaacctgttgcgcggcatcgtcgccaacccacgacagcggctcggcgagttgccgctgctggatgcgccggagcgccggcagaccctctccgaatggaacccggcccagcgcgagtgcgcggtgcagggcaccttgcagcagcgtttcgaggagcaggcgcggcaacggccacaggcggttgcgctgatcctcgag

SEQ ID NO: 13 - protein, 497 aa, Artificial Sequence
  Description of Artificial Sequence: Synthetic polypeptide
SRFARLPIPQTRQEMDNLPLSYAQERQWFLWQLEPESSAYHIPTALRLRGRLDIASLQRSFAALVERHESLRTRIARMGDEWVQVVSADVSLALEVEVQRGLDEQRLLERVEAEIARPFDLEQGPLLRVTLLEVDADEHVLVMVQHHIVSDGWSMQLMVEELVQLYAAYSQGLDVVLPALPIQYADYALWQRSWMEAGEKERQLAYWTGLLGGEQPVLELPFDRPRPARQSHRGAQLGFELSRELVEAVRALAQREGASSFMLLLASFQALLYRYSGQADIRVGVPIANRNRVETERLIGFFVNTQVLKADLDGRMGFDELLAQARQRALEAQAHQDLPFEQLVEALQPERNASHNPLFQVLFNHQSEIRSVTPEVQLEDLRLEGLAWDGQTAQFDLTLDIQEDENGIWASFDYATDLFDASTVERLAGHWRNLLRGIVANPRQRLGELPLLDAPERRQTLSEWNPAQRECAVQGTLQQRFEEQARQRPQAVALILE

SEQ ID NO: 14 - DNA, 1485 bp, Artificial Sequence
  Description of Artificial Sequence: Synthetic polynucleotide
tctagaacgacggatgcggtctcgacgataccgcttgccgatcggcagcaaccgttggcactgtccttcgctcaggagcgtcagtggttcctctggcaactggagccggaaagcgcggcctaccatattccgagtgccttgcgcctacgcgggcggctggacgtggatgccttgcaacgcagcttcgacagcctggtcgcgcggcatgaaaccttgcgtacccgcttccggctggagggagggcgttcgtaccagcaggtacaacctgcggttagcgtttccatcgagcgggaacagttcggtgaagaaggcctgatcgaacggatacaggccatcgttgtgcagccattcgacctggaacgggggccgctgctgcgggtgaacctgttgcaactggccgaggacgaccatgtactggtgctggtccagcaccacatcgtgtccgatggttggtcgatgcaggtgatggtcgaggaactggtccagctctatgccgcctatagccaagggctcgacgtggtgttgccagccctgccgatccagtacgcggactacgccctgtggcagcgcagctggatggaggcgggggaaaaggagcgccagttggcgtactggaccggcctgctgggcggcgagcagccggtgatcgagttgcccctcgatcacccgcggcagccgctgcgcagctatcgtggagcgcaattggacctggagctggagccacacctggcccttgccttgaaacagctggttcagcgcaagggtgtgaccatgttcatgctgttgctggcttccttccaggcgctgttgcatcgctatagcggacaggcggatatccgtgtcggcgtgcctatcgccaaccgtaaccgggttgaaaccgagcggctgatcggtttcttcgtcaacacccaggtgctcaaggccgacatcaatggccggatgggtttcgacgagttgctggcccaggcccgccagcgcgcgctggaggcacaggctcaccaggacctgccgttcgagcaactggtggaagccttgcagccggagcgcaatgccagccacaacccactgttccaggtgctgttcaaccatcagagcgagatacgctcggtgacgcccgaggttcagttggaggacctgcgtctggaaggcctggcctgggacggccagactgcgcagttcgacctgacgctggatattcaggaagacgaaaacggcatctgggcctccttcgactatgccaccgatctgttcgacgcctccaccgtggaacgcctggccggccattggcgcaacctgttgcgcggcatcgtcgccaacccacgacagcggctcggcgagttgccgctgctggatgcgccggagcgccggcagaccctctccgaatggaacccggcccagcgcgagtgcgcggtgcagggcaccttgcagcagcgtttcgaggagcaggcgcggcaacggccacaggcggttgcgctgatcctcgag

SEQ ID NO: 15 - protein, 495 aa, Artificial Sequence
  Description of Artificial Sequence: Synthetic polypeptide
SRTTDAVSTIPLADRQQPLALSFAQERQWFLWQLEPESAAYHIPSALRLRGRLDVDALQRSFDSLVARHETLRTRFRLEGGRSYQQVQPAVSVSIEREQFGEEGLIERIQAIVVQPFDLERGPLLRVNLLQLAEDDHVLVLVQHHIVSDGWSMQVMVEELVQLYAAYSQGLDVVLPALPIQYADYALWQRSWMEAGEKERQLAYWTGLLGGEQPVIELPLDHPRQPLRSYRGAQLDLELEPHLALALKQLVQRKGVTMFMLLLASFQALLHRYSGQADIRVGVPIANRNRVETERLIGFFVNTQVLKADINGRMGFDELLAQARQRALEAQAHQDLPFEQLVEALQPERNASHNPLFQVLFNHQSEIRSVTPEVQLEDLRLEGLAWDGQTAQFDLTLDIQEDENGIWASFDYATDLFDASTVERLAGHWRNLLRGIVANPRQRLGELPLLDAPERRQTLSEWNPAQRECAVQGTLQQRFEEQARQRPQAVALILE

SEQ ID NO: 16 - DNA, 1485 bp, Artificial Sequence
  Description of Artificial Sequence: Synthetic polynucleotide
tctagaacgacggatgcggtctcgacgataccgcttgccgatcggcagcaaccgttggcactgtccttcgctcaggagcgtcagtggttcctctggcaactggagccggaaagcgcggcctaccatattccgagtgccttgcgcctacgcgggcggctggacgtggatgccttgcaacgcagcttcgacagcctggtcgcgcggcatgaaaccttgcgtacccgcttccggctggagggagggcgttcgtaccagcaggtacaacctgcggttagcgtttccatcgagcgggaacagttcggtgaagaaggcctgatcgaacggatacaggccatcgttgtgcagccattcgacctggaacgggggccgctgctgcgggtgaacctgttgcaactggccgaggacgaccatgtactggtgctggtccagcaccacatcgtgtccgatggttggtcgatgcaggtgatggtcgaggaactggtccagctctatgccgcctatagccaagggctcgacgtggtgttgccagccctgccgatccagtacgcggactacgccctgtggcagcgcagctggatggaggcgggggaaaaggagcgccagttggcgtactggaccggcctgctgggcggcgagcagccggtgctggagttgccgttcgatcggccgcgtccggcccggcagagccatcgtggcgcgcagttgggtttcgagctatcgcgggaactggtcgaggccgtgagagccttggcccagcgtgaaggcgccagtagtttcatgctgttgctggcctcgttccaggcgctgttgtatcgctacagcgggcaggcggatatccgtgtcggtgtgccgatcgccaatcgcaaccgcgtggagaccgagcggctgatcggcttcttcgtcaacacccaggtgctcaaggccgacctggacggtcggatgggcttcgacgagctgctggcccaggcccgccaacgcgcgctggaggcccaggcgcaccaggacctgccgttcgagcaactggtggaggctttgcagccggaacgcagcctcggccacaacccgttgttccaggtcatgttcaatcaccaggccgactctcgttcggccaaccagggcgtgcaactgccaggcctgtcgctggagcggatggagtggcggagcagctccgtggccttcgacctgacgctggacgtgcacgaggccgaggacggtatctgggcatcgttcggctatgccacggatctgttcgaggcctcgaccgtcgagcgcctggctcggcactggcagaatctcctgcgcggcatcgtggccgaaccgggccggccggtcgccgagttgccgctgttgctggacgaggagcgcgattgcctgtcgcgggcctgggcagagaacgccgacgagggtgggttgccgcccctggtccagttgcagatccaggagcaggcccgtctgcgtccgcaggcgcaagcactggcgctcgag

SEQ ID NO: 17 - protein, 495 aa, Artificial Sequence
  Description of Artificial Sequence: Synthetic polypeptide
SRTTDAVSTIPLADRQQPLALSFAQERQWFLWQLEPESAAYHIPSALRLRGRLDVDALQRSFDSLVARHETLRTRFRLEGGRSYQQVQPAVSVSIEREQFGEEGLIERIQAIVVQPFDLERGPLLRVNLLQLAEDDHVLVLVQHHIVSDGWSMQVMVEELVQLYAAYSQGLDVVLPALPIQYADYALWQRSWMEAGEKERQLAYWTGLLGGEQPVLELPFDRPRPARQSHRGAQLGFELSRELVEAVRALAQREGASSFMLLLASFQALLYRYSGQADIRVGVPIANRNRVETERLIGFFVNTQVLKADLDGRMGFDELLAQARQRALEAQAHQDLPFEQLVEALQPERSLGHNPLFQVMFNHQADSRSANQGVQLPGLSLERMEWRSSSVAFDLTLDVHEAEDGIWASFGYATDLFEASTVERLARHWQNLLRGIVAEPGRPVAELPLLLDEERDCLSRAWAENADEGGLPPLVQLQIQEQARLRPQAQALALE

SEQ ID NO: 18 - DNA, 1485 bp, Artificial Sequence
  Description of Artificial Sequence: Synthetic polynucleotide
tctagaacgacggatgcggtctcgacgataccgcttgccgatcggcagcaaccgttggcactgtccttcgctcaggagcgtcagtggttcctctggcaactggagccggaaagcgcggcctaccatattccgagtgccttgcgcctacgcgggcggctggacgtggatgccttgcaacgcagcttcgacagcctggtcgcgcggcatgaaaccttgcgtacccgcttccggctggagggagggcgttcgtaccagcaggtacaacctgcggttagcgtttccatcgagcgggaacagttcggtgaagaaggcctgatcgaacggatacaggccatcgttgtgcagccattcgacctggaacgggggccgctgctgcgggtgaacctgttgcaactggccgaggacgaccatgtactggtgctggtccagcaccacatcgtgtccgatggttggtcgatgcaggtgatggtcgaggaactggtccagctctatgccgcctatagccaagggctcgacgtggtgttgccagccctgccgatccagtacgcggactacgccctgtggcagcgcagctggatggaggcgggggaaaaggagcgccagttggcgtactggaccggcctgctgggcggcgagcagccggtgatcgagttgcccctcgatcacccgcggcagccgctgcgcagctatcgtggagcgcaattggacctggagctggagccacacctggcccttgccttgaaacagctggttcagcgcaagggtgtgaccatgttcatgctgttgctggcttccttccaggcgctgttgcatcgctatagcggacaggcggatatccgtgtcggcgtgcctatcgccaaccgtaaccgggttgaaaccgagcggctgatcggtttcttcgtcaacacccaggtgctcaaggccgacatcaatggccggatgggtttcgacgagttgctggcccaggcccgccagcgcgcgctggaggcacaggctcaccaggacctgccgttcgagcaactggtggaggctttgcagccggaacgcagcctcggccacaacccgttgttccaggtcatgttcaatcaccaggccgactctcgttcggccaaccagggcgtgcaactgccaggcctgtcgctggagcggatggagtggcggagcagctccgtggccttcgacctgacgctggacgtgcacgaggccgaggacggtatctgggcatcgttcggctatgccacggatctgttcgaggcctcgaccgtcgagcgcctggctcggcactggcagaatctcctgcgcggcatcgtggccgaaccgggccggccggtcgccgagttgccgctgttgctggacgaggagcgcgattgcctgtcgcgggcctgggcagagaacgccgacgagggtgggttgccgcccctggtccagttgcagatccaggagcaggcccgtctgcgtccgcaggcgcaagcactggcgctcgag

SEQ ID NO: 19 - protein, 495 aa, Artificial Sequence
  Description of Artificial Sequence: Synthetic polypeptide
SRTTDAVSTIPLADRQQPLALSFAQERQWFLWQLEPESAAYHIPSALRLRGRLDVDALQRSFDSLVARHETLRTRFRLEGGRSYQQVQPAVSVSIEREQFGEEGLIERIQAIVVQPFDLERGPLLRVNLLQLAEDDHVLVLVQHHIVSDGWSMQVMVEELVQLYAAYSQGLDVVLPALPIQYADYALWQRSWMEAGEKERQLAYWTGLLGGEQPVIELPLDHPRQPLRSYRGAQLDLELEPHLALALKQLVQRKGVTMFMLLLASFQALLHRYSGQADIRVGVPIANRNRVETERLIGFFVNTQVLKADINGRMGFDELLAQARQRALEAQAHQDLPFEQLVEALQPERSLGHNPLFQVMFNHQADSRSANQGVQLPGLSLERMEWRSSSVAFDLTLDVHEAEDGIWASFGYATDLFEASTVERLARHWQNLLRGIVAEPGRPVAELPLLLDEERDCLSRAWAENADEGGLPPLVQLQIQEQARLRPQAQALALE

SEQ ID NO: 20 - DNA, 1491 bp, Artificial Sequence
  Description of Artificial Sequence: Synthetic polynucleotide
tctagattcgcccgcctgccgatcccgcagactcgccaggagatggacaacctgccgctgtcctatgcccaagagcggcagtggttcctctggcagctggagccggagagttccgcctaccacattcctaccgccctgcgcctgcgcggcaggttggacattgcgtccttgcagcgcagcttcgcggcgctcgtcgagcggcacgaaagcctgcgcacgcggatcgcgcggatgggtgatgaatgggtgcaggtcgtctccgccgacgtctcgctggcgctcgaagtcgaagtgcaacggggactcgacgaacagcgattgctggagcgggtcgaggcggagatcgcacgacccttcgatctcgaacagggaccgttactgcgggtgactttgctggaggtggacgccgacgagcatgtgctggtcatggtccagcaccatatcgtctccgacggttggtcgatgcaattgatggtcgaggaactggtccagctctatgccgcctatagccaagggctcgacgtggtgttgccggccctgccgatccagtacgcggactacgccctgtggcagcgcagctggatggaggcgggggaaaaggagcgccagttggcgtactggaccggcctgctgggcggcgagcagccggtgctggagttgccgttcgatcggccgcgtccggcccggcagagccatcgtggcgcgcagttgggtttcgagctatcgcgggaactggtcgaggccgtgagagccttggcccagcgtgaaggcgccagtagtttcatgctgttgctggcctcgttccaggcgctgttgtatcgctacagcgggcaggcggatatccgtgtcggtgtgccgatcgccaatcgcaaccgcgtggagaccgagcggctgatcggcttcttcgtcaacacccaggtgctcaaggccgacctggacggtcggatgggcttcgacgagctgctggcccaggcccgccaacgcgcgctggaggcccaggcgcaccaggacctgccgttcgagcaactggtggaggctttgcagccggaacgcagcctcggccacaacccgttgttccaggtcatgttcaatcaccaggccgactctcgttcggccaaccagggcgtgcaactgccaggcctgtcgctggagcggatggagtggcggagcagctccgtggccttcgacctgacgctggacgtgcacgaggccgaggacggtatctgggcatcgttcggctatgccacggatctgttcgaggcctcgaccgtcgagcgcctggctcggcactggcagaatctcctgcgcggcatcgtggccgaaccgggccggccggtcgccgagttgccgctgttgctggacgaggagcgcgattgcctgtcgcgggcctgggcagagaacgccgacgagggtgggttgccgcccctggtccagttgcagatccaggagcaggcccgtctgcgtccgcaggcgcaagcactggcgctcgag

SEQ ID NO: 21 - protein, 497 aa, Artificial Sequence
  Description of Artificial Sequence: Synthetic polypeptide
SRFARLPIPQTRQEMDNLPLSYAQERQWFLWQLEPESSAYHIPTALRLRGRLDIASLQRSFAALVERHESLRTRIARMGDEWVQVVSADVSLALEVEVQRGLDEQRLLERVEAEIARPFDLEQGPLLRVTLLEVDADEHVLVMVQHHIVSDGWSMQLMVEELVQLYAAYSQGLDVVLPALPIQYADYALWQRSWMEAGEKERQLAYWTGLLGGEQPVLELPFDRPRPARQSHRGAQLGFELSRELVEAVRALAQREGASSFMLLLASFQALLYRYSGQADIRVGVPIANRNRVETERLIGFFVNTQVLKADLDGRMGFDELLAQARQRALEAQAHQDLPFEQLVEALQPERSLGHNPLFQVMFNHQADSRSANQGVQLPGLSLERMEWRSSSVAFDLTLDVHEAEDGIWASFGYATDLFEASTVERLARHWQNLLRGIVAEPGRPVAELPLLLDEERDCLSRAWAENADEGGLPPLVQLQIQEQARLRPQAQALALE

SEQ ID NO: 22 - DNA, 1491 bp, Artificial Sequence
  Description of Artificial Sequence: Synthetic polynucleotide
tctagattcgcccgcctgccgatcccgcagactcgccaggagatggacaacctgccgctgtcctatgcccaagagcggcagtggttcctctggcagctggagccggagagttccgcctaccacattcctaccgccctgcgcctgcgcggcaggttggacattgcgtccttgcagcgcagcttcgcggcgctcgtcgagcggcacgaaagcctgcgcacgcggatcgcgcggatgggtgatgaatgggtgcaggtcgtctccgccgacgtctcgctggcgctcgaagtcgaagtgcaacggggactcgacgaacagcgattgctggagcgggtcgaggcggagatcgcacgacccttcgatctcgaacagggaccgttactgcgggtgactttgctggaggtggacgccgacgagcatgtgctggtcatggtccagcaccatatcgtctccgacggttggtcgatgcaattgatggtcgaggaactggtccagctctatgccgcctatagccaagggctcgacgtggtgttgccggccctgccgatccagtacgcggactacgccctgtggcagcgcagctggatggaggcgggggaaaaggagcgccagttggcgtactggaccggcctgctgggcggcgagcagccggtgatcgagttgcccctcgatcacccgcggcagccgctgcgcagctatcgtggagcgcaattggacctggagctggagccacacctggcccttgccttgaaacagctggttcagcgcaagggtgtgaccatgttcatgctgttgctggcttccttccaggcgctgttgcatcgctatagcggacaggcggatatccgtgtcggcgtgcctatcgccaaccgtaaccgggttgaaaccgagcggctgatcggtttcttcgtcaacacccaggtgctcaaggccgacatcaatggccggatgggtttcgacgagttgctggcccaggcccgccagcgcgcgctggaggcacaggctcaccaggacctgccgttcgagcaactggtggaagccttgcagccggagcgcaatgccagccacaacccactgttccaggtgctgttcaaccatcagagcgagatacgctcggtgacgcccgaggttcagttggaggacctgcgtctggaaggcctggcctgggacggccagactgcgcagttcgacctgacgctggatattcaggaagacgaaaacggcatctgggcctccttcgactatgccaccgatctgttcgacgcctccaccgtggaacgcctggccggccattggcgcaacctgttgcgcggcatcgtcgccaacccacgacagcggctcggcgagttgccgctgctggatgcgccggagcgccggcagaccctctccgaatggaacccggcccagcgcgagtgcgcggtgcagggcaccttgcagcagcgtttcgaggagcaggcgcggcaacggccacaggcggttgcgctgatcctcgag

SEQ ID NO: 23 - protein, 497 aa, Artificial Sequence
  Description of Artificial Sequence: Synthetic polypeptide
SRFARLPIPQTRQEMDNLPLSYAQERQWFLWQLEPESSAYHIPTALRLRGRLDIASLQRSFAALVERHESLRTRIARMGDEWVQVVSADVSLALEVEVQRGLDEQRLLERVEAEIARPFDLEQGPLLRVTLLEVDADEHVLVMVQHHIVSDGWSMQLMVEELVQLYAAYSQGLDVVLPALPIQYADYALWQRSWMEAGEKERQLAYWTGLLGGEQPVIELPLDHPRQPLRSYRGAQLDLELEPHLALALKQLVQRKGVTMFMLLLASFQALLHRYSGQADIRVGVPIANRNRVETERLIGFFVNTQVLKADINGRMGFDELLAQARQRALEAQAHQDLPFEQLVEALQPERNASHNPLFQVLFNHQSEIRSVTPEVQLEDLRLEGLAWDGQTAQFDLTLDIQEDENGIWASFDYATDLFDASTVERLAGHWRNLLRGIVANPRQRLGELPLLDAPERRQTLSEWNPAQRECAVQGTLQQRFEEQARQRPQAVALILE

SEQ ID NO: 24 - DNA, 466 bp, Artificial Sequence
  Description of Artificial Sequence: Synthetic polynucleotide
actagtggaagccttgcagccggagcgcaatgccagccacaacccactgttccaggtgatgttcaaccatcagagcgagatacgctcggtgacgcccgaggttcagttggaggacctgcgtctggaaggcctggcctgggacggccagactgcgcagttcgacctgacgctggatgtgcacgaagccgaagacggcatctgggcctccttcggctatgccaccgatctgttcgacgcctccaccgtggaacgcctggccggccattggcgcaacctgttgcgcggcatcgtcgccaacccacgacagcggctcggcgagttgccgctgctggatgcgccggagcgccggcagaccctctccgaatggaacccggcccagcgcgagtgcgcggtgcagggcaccttgcagcagcgtttcgaggagcaggcgcggcaacggccacaggcggttgcgctgatcctcgag

SEQ ID NO: 25 - protein, 155 aa, Artificial Sequence
  Description of Artificial Sequence: Synthetic polypeptide
LVEALQPERNASHNPLFQVMFNHQSEIRSVTPEVQLEDLRLEGLAWDGQTAQFDLTLDVHEAEDGIWASFGYATDLFDASTVERLAGHWRNLLRGIVANPRQRLGELPLLDAPERRQTLSEWNPAQRECAVQGTLQQRFEEQARQRPQAVALILE

SEQ ID NO: 26 - DNA, 466 bp, Artificial Sequence
  Description of Artificial Sequence: Synthetic polynucleotide
actagtggaagccttgcagccggagcgcagcctcggccacaacccactgttccaggtgatgttcaaccatcagagcgagatacgctcggtgacgcccgaggttcagttggaggacctgcgtctggaaggcctggcctgggacggccagactgcgcagttcgacctgacgctggatgtgcacgaagccgaagacggcatctgggcctccttcggctatgccaccgatctgttcgaggcctccaccgtggaacgcctggcccggcattggcagaacctgttgcgcggcatcgtcgccaacccacgacagcggctcggcgagttgccgctgctggatgcgccggagcgccggcagaccctctccgaatggaacccggcccagcgcgagtgcgcggtgcagggcaccttgcagcagcgtttcgaggagcaggcgcggcaacggccacaggcggttgcgctgatcctcgag

SEQ ID NO: 27 - protein, 155 aa, Artificial Sequence
  Description of Artificial Sequence: Synthetic polypeptide
LVEALQPERSLGHNPLFQVMFNHQSEIRSVTPEVQLEDLRLEGLAWDGQTAQFDLTLDVHEAEDGIWASFGYATDLFEASTVERLARHWQNLLRGIVANPRQRLGELPLLDAPERRQTLSEWNPAQRECAVQGTLQQRFEEQARQRPQAVALILE

SEQ ID NO: 28 - DNA, 466 bp, Artificial Sequence
  Description of Artificial Sequence: Synthetic polynucleotide
actagtggaagccttgcagccggagcgcaatgccagccacaacccactgttccaggtgctgttcaaccatcaggccgactctcgttcggccaaccagggcgtgcaactgccaggcctgtcgctggagcggatggagtggcggagcagctccgtggccttcgacctgacgctggatattcaggaagacgaaaacggcatctgggcctccttcgactatgccaccgatctgttcgacgcctccaccgtggaacgcctggccggccattggcgcaacctgttgcgcggcatcgtcgccaacccacgacagcggctcggcgagttgccgctgctggatgcgccggagcgccggcagaccctctccgaatggaacccggcccagcgcgagtgcgcggtgcagggcaccttgcagcagcgtttcgaggagcaggcgcggcaacggccacaggcggttgcgctgatcctcgag

SEQ ID NO: 29 - protein, 155 aa, Artificial Sequence
  Description of Artificial Sequence: Synthetic polypeptide
LVEALQPERNASHNPLFQVLFNHQADSRSANQGVQLPGLSLERMEWRSSSVAFDLTLDIQEDENGIWASFDYATDLFDASTVERLAGHWRNLLRGIVANPRQRLGELPLLDAPERRQTLSEWNPAQRECAVQGTLQQRFEEQARQRPQAVALILE

SEQ ID NO: 30 - DNA, 466 bp, Artificial Sequence
  Description of Artificial Sequence: Synthetic polynucleotide
actagtggaagccttgcagccggagcgcaatgccagccacaacccactgttccaggtgatgttcaaccatcaggccgactctcgttcggccaaccagggcgtgcaactgccaggcctgtcgctggagcggatggagtggcggagcagctccgtggccttcgacctgacgctggatgtgcacgaagccgaagacggcatctgggcctccttcggctatgccaccgatctgttcgacgcctccaccgtggaacgcctggccggccattggcgcaacctgttgcgcggcatcgtcgccaacccacgacagcggctcggcgagttgccgctgctggatgcgccggagcgccggcagaccctctccgaatggaacccggcccagcgcgagtgcgcggtgcagggcaccttgcagcagcgtttcgaggagcaggcgcggcaacggccacaggcggttgcgctgatcctcgag

SEQ ID NO: 31 - protein, 155 aa, Artificial Sequence
  Description of Artificial Sequence: Synthetic polypeptide
LVEALQPERNASHNPLFQVMFNHQADSRSANQGVQLPGLSLERMEWRSSSVAFDLTLDVHEAEDGIWASFGYATDLFDASTVERLAGHWRNLLRGIVANPRQRLGELPLLDAPERRQTLSEWNPAQRECAVQGTLQQRFEEQARQRPQAVALILE

SEQ ID NO: 32 - DNA, 466 bp, Artificial Sequence
  Description of Artificial Sequence: Synthetic polynucleotide
actagtggaagccttgcagccggagcgcaatgccagccacaacccactgttccaggtgatgttcaaccatcaggccgactctcgctcggtgacgcccgaggttcagttggaggacctgcgtctggaaggcctggcctggcggagcagctccgtggccttcgacctgacgctggatgtgcacgaagccgaagacggcatctgggcctccttcggctatgccaccgatctgttcgacgcctccaccgtggaacgcctggccggccattggcgcaacctgttgcgcggcatcgtcgccaacccacgacagcggctcggcgagttgccgctgctggatgcgccggagcgccggcagaccctctccgaatggaacccggcccagcgcgagtgcgcggtgcagggcaccttgcagcagcgtttcgaggagcaggcgcggcaacggccacaggcggttgcgctgatcctcgag

SEQ ID NO: 33 - protein, 155 aa, Artificial Sequence
  Description of Artificial Sequence: Synthetic polypeptide
LVEALQPERNASHNPLFQVMFNHQADSRSVTPEVQLEDLRLEGLAWRSSSVAFDLTLDVHEAEDGIWASFGYATDLFDASTVERLAGHWRNLLRGIVANPRQRLGELPLLDAPERRQTLSEWNPAQRECAVQGTLQQRFEEQARQRPQAVALILE

SEQ ID NO: 34 - DNA, 466 bp, Artificial Sequence
  Description of Artificial Sequence: Synthetic polynucleotide
actagtggaggctttgcagccggaacgcagcctcggccacaacccgttgttccaggtcatgttcaatcaccaggccgactctcgttcggccaaccagggcgtgcaactgccaggcctgtcgctggagcggatggagtggcggagcagctccgtggccttcgacctgacgctggacgtgcacgaggccgaggacggtatctgggcatcgttcggctatgccacggatctgttcgaggcctcgaccgtcgagcgcctggctcggcactggcagaacctgttgcgcggcatcgtcgccaacccacgacagcggctcggcgagttgccgctgctggatgcgccggagcgccggcagaccctctccgaatggaacccggcccagcgcgagtgcgcggtgcagggcaccttgcagcagcgtttcgaggagcaggcgcggcaacggccacaggcggttgcgctgatcctcgag

SEQ ID NO: 35 - protein, 155 aa, Artificial Sequence
  Description of Artificial Sequence: Synthetic polypeptide
LVEALQPERSLGHNPLFQVMFNHQADSRSANQGVQLPGLSLERMEWRSSSVAFDLTLDVHEAEDGIWASFGYATDLFEASTVERLARHWQNLLRGIVANPRQRLGELPLLDAPERRQTLSEWNPAQRECAVQGTLQQRFEEQARQRPQAVALILE

SEQ ID NO: 36 - DNA, 466 bp, Artificial Sequence
  Description of Artificial Sequence: Synthetic polynucleotide
actagtggaagccttgcagccggagcgcaatgccagccacaacccactgttccaggtgctgttcaaccatcagagcgagatacgctcggtgacgcccgaggttcagttggaggacctgcgtctggaaggcctggcctgggacggccagactgcgcagttcgacctgacgctggatattcaggaagacgaaaacggcatctgggcctccttcgactatgccaccgatctgttcgacgcctccaccgtggaacgcctggccggccattggcgcaatctcctgcgcggcatcgtggccgaaccgggccggccggtcgccgagttgccgctgttgctggacgaggagcgcgattgcctgtcgcgggcctgggcagagaacgccgacgagggtgggttgccgcccctggtccagttgcagatccaggagcaggcccgtctgcgtccgcaggcgcaagcactggcgctcgag

SEQ ID NO: 37 - protein, 155 aa, Artificial Sequence
  Description of Artificial Sequence: Synthetic polypeptide
LVEALQPERNASHNPLFQVLFNHQSEIRSVTPEVQLEDLRLEGLAWDGQTAQFDLTLDIQEDENGIWASFDYATDLFDASTVERLAGHWRNLLRGIVAEPGRPVAELPLLLDEERDCLSRAWAENADEGGLPPLVQLQIQEQARLRPQAQALALE

SEQ ID NO: 38 - DNA, 2945 bp, Artificial Sequence
  Description of Artificial Sequence: Synthetic polynucleotide
tctagattcgcccgcctgccgatcccgcagactcgccaggagatggacaacctgccgctgtcctatgcccaagagcggcagtggttcctctggcagctggagccggagagttccgcctaccacattcctaccgccctgcgcctgcgcggcaggttggacattgcgtccttgcagcgcagcttcgcggcgctcgtcgagcggcacgaaagcctgcgcacgcggatcgcgcggatgggtgatgaatgggtgcaggtcgtctccgccgacgtctcgctggcgctcgaagtcgaagtgcaacggggactcgacgaacagcgattgctggagcgggtcgaggcggagatcgcacgacccttcgatctcgaacagggaccgttactgcgggtgactttgctggaggtggacgccgacgagcatgtgctggtcatggtccagcaccatatcgtctccgacggttggtcgatgcaattgatggtcgaggaactggtccagctctatgccgcctatagccaagggctcgacgtggtgttgccggccctgccgatccagtacgcggactacgccctgtggcagcgcagctggatggaggcgggggaaaaggagcgccagttggcgtactggaccggcctgctgggcggcgagcagccggtgatcgagttgcccctcgatcacccgcggcagccgctgcgcagctatcgtggagcgcaattggacctggagctggagccacacctggcccttgccttgaaacagctggttcagcgcaagggtgtgaccatgttcatgctgttgctggcttccttccaggcgctgttgcatcgctatagcggacaggcggatatccgtgtcggcgtgcctatcgccaaccgtaaccgggttgaaaccgagcggctgatcggtttcttcgtcaacacccaggtgctcaaggccgacatcaatggccggatgggtttcgacgagttgctggcccaggcccgccagcgcgcgctggaggcacaggctcaccaggacctgccgttcgagcaactggtggaggctttgcagccggaacgcagcctcggccacaacccgttgttccaggtcatgttcaatcaccaggccgactctcgttcggccaaccagggcgtgcaactgccaggcctgtcgctggagcggatggagtggcggagcagctccgtggccttcgacctgacgctggacgtgcacgaggccgaggacggtatctgggcatcgttcggctatgccacggatctgttcgaggcctcgaccgtcgagcgcctggctcggcactggcagaatctcctgcgcggcatcgtggccgaaccgggccggccggtcgccgagttgccgctgttgctggacgaggagcgcgattgcctgtcgcgggcctgggcagagaacgccgacgagggtgggttgccgcccctggtccagttgcagatccaggagcaggcccgtctgcgtccgcaggcgcaagcactggcgctggaggggcaggccttgagctacgccgagctcaacgcccgcgccaatcgtctggctcactgcctgatagcgcgtggcgtcggtcccgatgtgctggtgggaatcgccgtcgagcgctcgctggacatggtggtcggtctgctggcgatcctcaaggccggtggtgcctatgtgccgctggacccgacctatccgcaggaccgtttgcgtcacatgctcgaggacagcgccgtcggcctgttgctcagccaggagcatttgctgcccgggctgcctttgcacgaagggctggaggtgctctccatcgaccgcctggaacgggacgcatcggtgtctacggatgatccggtggtgaacctgcggccggagaacctggcctatgtgatctacacctccggctccaccggaaaacccaagggcgtggccatcagccatgcggcgcttgcgcagttctcgcgtatcgccagtggttattccgcgctcaccccggaggatcggatattgcagttcgccaccctgagcttcgacggcttcgtcgaacagctctatccggcgctgacccgtggtgcctgcgtggtcctgcgtggcggcgacctctgggataccggtgagctgtatcggcagatagtcgagcagggcgtgacccttgccgacctgcccacggcgtactggaacctgttcctgctcgatgccctggccgagccacggcgttcctacggtgccttgcggcagatccacatcggtggcgaagccatgccactggaggggccgaagctctggcggcaagccggcatgggccgggtgaggttgctcaatacctatggaccgaccgaggccacggtggtgtccagcgtcttcgattgttccgccgagaacgcccgggtgggcaatgccagtcctatcggccaggcgctacccggccgtacgttgctggtgctggatgaacatctcggcctactgcccgtagggccggtaggcgagctttatatcgccagccgtgccgggctggcccgtgcctaccacgatcggcccggcttgaccgccgagcgcttcttgcccgaccccttcggcgaaccgggctcaaggctctaccggaccggcgacctggcgcgccgacgcggtgacggcgtgatcgagtacatggggcgtgccgaccatcaggtgaagatccgcggcttccgcatcgagctgggggaggtcgaagcccgcctcctggacttggagggaatacgcgaagcggcggctcttgcgctggacggtcaactggtggcctacctggtggctgaggggggcgaggacgaaactcgccagccggctttgcgcgagcgtatccgcacagcgctacgggcctcgctaccggactacatggtgccctcgcacctgctgttcctcgagcggatgccgctcagtccaaatggcaagctggaccgtcgggcgctgccgaagccggatgcggccgc

SEQ ID NO: 39 - protein, 977 aa, Artificial Sequence
  Description of Artificial Sequence: Synthetic polypeptide
FARLPIPQTRQEMDNLPLSYAQERQWFLWQLEPESSAYHIPTALRLRGRLDIASLQRSFAALVERHESLRTRIARMGDEWVQVVSADVSLALEVEVQRGLDEQRLLERVEAEIARPFDLEQGPLLRVTLLEVDADEHVLVMVQHHIVSDGWSMQLMVEELVQLYAAYSQGLDVVLPALPIQYADYALWQRSWMEAGEKERQLAYWTGLLGGEQPVIELPLDHPRQPLRSYRGAQLDLELEPHLALALKQLVQRKGVTMFMLLLASFQALLHRYSGQADIRVGVPIANRNRVETERLIGFFVNTQVLKADINGRMGFDELLAQARQRALEAQAHQDLPFEQLVEALQPERSLGHNPLFQVMFNHQADSRSANQGVQLPGLSLERMEWRSSSVAFDLTLDVHEAEDGIWASFGYATDLFEASTVERLARHWQNLLRGIVAEPGRPVAELPLLLDEERDCLSRAWAENADEGGLPPLVQLQIQEQARLRPQAQALALEGQALSYAELNARANRLAHCLIARGVGPDVLVGIAVERSLDMVVGLLAILKAGGAYVPLDPTYPQDRLRHMLEDSAVGLLLSQEHLLPGLPLHEGLEVLSIDRLERDASVSTDDPVVNLRPENLAYVIYTSGSTGKPKGVAISHAALAQFSRIASGYSALTPEDRILQFATLSFDGFVEQLYPALTRGACVVLRGGDLWDTGELYRQIVEQGVTLADLPTAYWNLFLLDALAEPRRSYGALRQIHIGGEAMPLEGPKLWRQAGMGRVRLLNTYGPTEATVVSSVFDCSAENARVGNASPIGQALPGRTLLVLDEHLGLLPVGPVGELYIASRAGLARAYHDRPGLTAERFLPDPFGEPGSRLYRTGDLARRRGDGVIEYMGRADHQVKIRGFRIELGEVEARLLDLEGIREAAALALDGQLVAYLVAEGGEDETRQPALRERIRTALRASLPDYMVPSHLLFLERMPLSPNGKLDRRALPKPD

SEQ ID NO: 40 - DNA, 2912 bp, Artificial Sequence
  Description of Artificial Sequence: Synthetic polynucleotide
tctagagggcagggcaatgctgcgccacgctttatcaaggccgaccgcagccagccgctgggcttgtcttacgcgcagcagcgccagtggtttctctggcagcttgatccagaaagcactgcttacaccattcctgcggccctgcgtctgagcggctcgctggacattgccgcgctggagcacagtttcagcgcattgattgcccgccacgaaaccctgcgcactaccttccgccagcagggcgaacaggctgtgcagatcatccatgcgccgcgtgccttgaccctgatggtcgagtccgtgcctgccggtcaaacccttgaagcctgcgtgcagcaggaaatgcagcgcccgttcgatctggaaaagggcccgctgctgcgcgtccgcttgctgaaccttgcaactgacgaacatgtgctgattctgatccagcaccacatcgtttccgatggctggtcgatgccgatcatggtcgatgaactggtgcgcctgtacgaaggctacagccagggccgtgaggtggtgttgaccgcgctggacatgcaatacgccgactacgcgctgtggcagcgcaactggatggacgccggagaacaggcgcggcagctggattactggaagcagcaacttggcgaacagcagccgattctggaattgcccgccgatcatccgcgcccggtcgtccaaagccacgccggtgcgcggctggcggtcgagctggcgccagcgttgatcgacgacttgaaacaggtcgcgcggcaacagggcgtcacactgttcatgctgttgctggcgtcgttccagaccttgctgcatcgccacagcggccagccggacattcgtgtcggcgtgccgattgccaaccgcacccgcgcggaaaccgaaggcctgatcggtttcttcgtcaacacccaggtgctgcgcgccgaattcgacctgcacaccacgttcagcgagctgctgcaacaggtcaaacaggcggccctgcaagctcaagcgcatcaggaactgccgttcgaacagctggtcgaggccttgcaacctcaacgcagcctcagccacagcccgctgttccaggtgatgttcaaccaccagagccaggccagtgctgaggtgcgcgcactgcccggtttgcaggtcgaagcgctgacgtccgagagctatccggcgcagttcgacctaaccctcaacaccgccgaacacgatggcggtttgagcgcgggcctgacctatgccaccgcgctgttcgaacgcagcaccatcgagcgcatggccgggcactggctcgcgctgttgcaggccatttgcgccaatgcgggtcagcgtattgctgaggtgccaatgcttgacgctgccgaacagcagcagattgttcgcgactggaacgccacggctgccgatttccctggtgagcactgcctgcacagcctgatcgaagcccaggtacaggctacgccggacgctccggcactgatttttgcggctgaacaactgagctatgcgcaacttaacgcccgcgctaatcagcttgcccatcgcttgcgtgaggcgggtgttggcccggatgtgctggtggggatttgtgtcgagcgcagcgtggatatggtcattggtctgctggcgatcatcaaggccggtggcgcttacgtgccgctggacccggattaccctgaagatcgtttggcctacatgatgcaggacagcggcattggcttgctgttgacccagagtgcgctgctacagggcctgccggttcaggtgcagagcctttgtctggatcaggagggcgattggcttgacggttacagcaccgccaacccgatcaacctcagtcacccgcagaacctggcatacgtaatttacacctccggttcgaccggcaagcccaagggcgccggcaacagccatcgcgccctggtcaaccgtttgcactggatgcagaaggcttacgcactggatggcagcgatacggtattgcagaaaaccccgttcagtttcgatgtctcggtgtgggaattcttctggccgctgctgaccggagcacgtttggccgtggcgttgccgggcgatcatcgcgatccggagcggctggtgcagaccatccgcgaacatcaggtcacgacgctgcactttgtcccgtcgatgctccaggcgtttctgactcatccgcaggtagaaggctgtaacagcctgcgtcgtgtggtgtgcagcggcgaagcactgccttccgaactggccggtcaggtgctcaagcgtctgccgcagacgggtttgttcaacctgtacggcccgaccgaagcggctatcgacgtgacgcattggacctgcaccaaagacgacgtgctcagcgtgccgattggtcgacctatcgataacctgaaaacccatatcctcgacgacggattgctgcctgccgcgcagggcgtctcggcagagctgtacctgggcggtatcggtctggcgcggggttatcacaatcgcgcggcgctgacggctgaacgctttgtgccggatcctttcgacgagcagggcgggcgtctttaccggaccggggatctggcgcgttatcgcgatgaaggcgttatcgaatacgccgggcgtatcgaccatcaggtgaaaattcgcggcctgcgtatcgagctgggcgagatcgaagccagcctgctggagcacggcagcgttcaggaagcagtggtcatcgacgttgacggcccatccggcaagcagctggcagcctatctggtggctgagcacagtggcgataacctgcgtgatgcactcaaggtgtatctcaaggaaacactgcccgattacatggtgccgacccacttcgtctggctggcaagcatgcccctgagcgccaacggcaagctggatcgcaaagccctgccgacaccagacgcggccgc

SEQ ID NO: 41 - protein, 966 aa, Artificial Sequence
  Description of Artificial Sequence: Synthetic polypeptide
GQGNAAPRFIKADRSQPLGLSYAQQRQWFLWQLDPESTAYTIPAALRLSGSLDIAALEHSFSALIARHETLRTTFRQQGEQAVQIIHAPRALTLMVESVPAGQTLEACVQQEMQRPFDLEKGPLLRVRLLNLATDEHVLILIQHHIVSDGWSMPIMVDELVRLYEGYSQGREVVLTALDMQYADYALWQRNWMDAGEQARQLDYWKQQLGEQQPILELPADHPRPVVQSHAGARLAVELAPALIDDLKQVARQQGVTLFMLLLASFQTLLHRHSGQPDIRVGVPIANRTRAETEGLIGFFVNTQVLRAEFDLHTTFSELLQQVKQAALQAQAHQELPFEQLVEALQPQRSLSHSPLFQVMFNHQSQASAEVRALPGLQVEALTSESYPAQFDLTLNTAEHDGGLSAGLTYATALFERSTIERMAGHWLALLQAICANAGQRIAEVPMLDAAEQQQIVRDWNATAADFPGEHCLHSLIEAQVQATPDAPALIFAAEQLSYAQLNARANQLAHRLREAGVGPDVLVGICVERSVDMVIGLLAIIKAGGAYVPLDPDYPEDRLAYMMQDSGIGLLLTQSALLQGLPVQVQSLCLDQEGDWLDGYSTANPINLSHPQNLAYVIYTSGSTGKPKGAGNSHRALVNRLHWMQKAYALDGSDTVLQKTPFSFDVSVWEFFWPLLTGARLAVALPGDHRDPERLVQTIREHQVTTLHFVPSMLQAFLTHPQVEGCNSLRRVVCSGEALPSELAGQVLKRLPQTGLFNLYGPTEAAIDVTHWTCTKDDVLSVPIGRPIDNLKTHILDDGLLPAAQGVSAELYLGGIGLARGYHNRAALTAERFVPDPFDEQGGRLYRTGDLARYRDEGVIEYAGRIDHQVKIRGLRIELGEIEASLLEHGSVQEAVVIDVDGPSGKQLAAYLVAEHSGDNLRDALKVYLKETLPDYMVPTHFVWLASMPLSANGKLDRKALPTPD

SEQ ID NO: 42 - DNA, 2957 bp, Artificial Sequence
  Description of Artificial Sequence: Synthetic polynucleotide
tctagacaggccccaggcgcgccgaccgcgcccgcgctgttgccggtagggcgggaccagccgttgccgctgtcctacgcccaggagcgccagtggtttttatggcagctggagccgcaaagcgccgcgtaccacatcccaagcgccttgcgtttgaaagggcagcttgatctgggtgcactgcaacgcagtttcgataccttgctggcccggcatgaaagcctgcgcacccatttgcgccaggagcgcgaccgcacggttcaaatcatttcaccgcagctgtcgttgcagatagcgcacgccgaggtgcaggaagcgcagctcaaggcgcgggtcgaggccgaaatagcccaacccttcaatctggaacaagggcctttgctgcgggtttcgttgctacgcatcgccgcagatgaacatgtattggtattggtgcagcatcacatcgtgtccgatggctggtcgatgcaactgatggttgaagagctggtgcaactgtatgcggcctacagccagggacaggtgttgcaatggccggcgctgccgattcagtacgccgactacgccgtatggcagcgcaactggatggaggcgggcgagaaggcccgtcaactggcgtattggcgcgacatgctcggcggtgagcagagcgtgttggcgttgccgttcgatcacccacgtccggctgtgcaaagccatcgtggcgcgcgcctggcattcgaactgcccggcgcgttgacccaaggcctcaaggccctggccaagcagcaggacgtgaccttgttcatgctgctattggcctcgttccagaccttgctgcatcgctacagtggccaggaagagatccgtgtcggggtgccgatcgccaaccgcaatcgcagcgagaccgagcgtctgatcggcttcttcgtcaacacccaggtgctcaaggccgatctccacggccagatgagcgtcgagcaactgttgcaacaggcccggcaacgggcgctggacgcccaggcccaccaggacctgcccttcgaacaactggtggaagcgctgcaacccgagcgcagcctgagccacaacccgttgttccaagtgatgttcaaccaccagaccgacgtgggccaggctcaggttcagcagcaactgccgaatctttcggtagaagggctggaatgggaaagcaagacggcgcatttcgacctggacctggatatccaggaatccaccgaaggtatctgggccacgctcggctatgcccaggacctgtttgaggccagtaccgtgcaacgcatggcgcgacactggcagaacctgttgcaaggcatggttgccgacccacggcagaatctcagccaattaaacctgctggacaacgccgaacggcaacagattcttcaactgtggaaccagagcgacgccggcttctcggccaagcgcctggtgcacgagttggtggccgaccgcgccggggaaacccccgaggcggtggcggtgaaatttggcgagcaacagctgacttacggcgagctggaccgccaggccaaccgcctggcccatgcattgatcgcccgtggcgtcggccccgaagtgcgcgtggcgattgccatgccacgcagcgccgagatcatggtggcgttcctggcagtgatgaaagccggtggcgtctacgtgccgctggacatcgaatacccgcgtgaccgcctgctgtacatgatgcaggacagccgcgcccgattgctgttgacccattcggcggtgcaacagcgcttgccgattccagacggcctggaagcccttgccgtggaccaggcgcaagcctggtccgctgacgacgacaccgcacccgaggtggcgctggacggcgacaacctggcctacgtgatctacacctccggctccaccggcatgcccaaaggcgtggcggtgtcccacggcccgttggtggcgcacatcattgccaccggcgagcgttatgaaacgtcgccggccgattgcgaactgcacttcatgtcgttcgccttcgacggctcccacgaaggctggatgcacccactgatcaacggcgcgagcgtgctgattcgcgatgacagcctgtggctgccggagtacacctaccagcagatgcatcgccatcacgtgaccatggccgtgtttccgccggtgtacctgcagcagctggccgaacatgccgaacgcgacggtaacccgccgaaggttcgtgtgtactgcttcggcggtgatgccgtggcccaggccagctatgacctggcgtggcgtgcactcaagccgacctacctgttcaacggctacggcccgaccgaaaccgtggtcacgccgttgctgtggaaagcccgccgtggtgacccgtgcggtgccgtctacgcgccgatcggcacactgctgggcaatcgcagcggctacgtattggacgcgcaactcaacctgcaacccatcggcgtagccggtgagttgtacctgggcggcgagggcgtggcccggggttacctggagcgtccggccctgaccgccgagcgcttcgtaccggacccgttcggcaagcccggcagccgcgtgtatcgcagcggcgacttgacccgtggccgtccggatggcgtggtggattacctcggccgtgtcgaccatcaggtgaaaatccgtggcttccgtattgagctgggcgagatcgaagcgcgcctgcgcgagcaggacagtgtcggcgaaaccgtggtggtggcccaggaagggccgagcggcaagcaactggtcgcctatgtggtgccgctggatccgttgctcgtcgacgacgccgtggcgcagtcgacctgccgcgaagccttgcgccgcgccctgaaaacccgcttgccggactatatggtgcccacgcacctgatgttccttgagcgcatgccgctgacgccgaacggcaagctcgaccgcaagggcctgccgcgcccggatgcggccgc

SEQ ID NO: 43 - protein, 981 aa, Artificial Sequence
  Description of Artificial Sequence: Synthetic polypeptide
QAPGAPTAPALLPVGRDQPLPLSYAQERQWFLWQLEPQSAAYHIPSALRLKGQLDLGALQRSFDTLLARHESLRTHLRQERDRTVQIISPQLSLQIAHAEVQEAQLKARVEAEIAQPFNLEQGPLLRVSLLRIAADEHVLVLVQHHIVSDGWSMQLMVEELVQLYAAYSQGQVLQWPALPIQYADYAVWQRNWMEAGEKARQLAYWRDMLGGEQSVLALPFDHPRPAVQSHRGARLAFELPGALTQGLKALAKQQDVTLFMLLLASFQTLLHRYSGQEEIRVGVPIANRNRSETERLIGFFVNTQVLKADLHGQMSVEQLLQQARQRALDAQAHQDLPFEQLVEALQPERSLSHNPLFQVMFNHQTDVGQAQVQQQLPNLSVEGLEWESKTAHFDLDLDIQESTEGIWATLGYAQDLFEASTVQRMARHWQNLLQGMVADPRQNLSQLNLLDNAERQQILQLWNQSDAGFSAKRLVHELVADRAGETPEAVAVKFGEQQLTYGELDRQANRLAHALIARGVGPEVRVAIAMPRSAEIMVAFLAVMKAGGVYVPLDIEYPRDRLLYMMQDSRARLLLTHSAVQQRLPIPDGLEALAVDQAQAWSADDDTAPEVALDGDNLAYVIYTSGSTGMPKGVAVSHGPLVAHIIATGERYETSPADCELHFMSFAFDGSHEGWMHPLINGASVLIRDDSLWLPEYTYQQMHRHHVTMAVFPPVYLQQLAEHAERDGNPPKVRVYCFGGDAVAQASYDLAWRALKPTYLFNGYGPTETVVTPLLWKARRGDPCGAVYAPIGTLLGNRSGYVLDAQLNLQPIGVAGELYLGGEGVARGYLERPALTAERFVPDPFGKPGSRVYRSGDLTRGRPDGVVDYLGRVDHQVKIRGFRIELGEIEARLREQDSVGETVVVAQEGPSGKQLVAYVVPLDPLLVDDAVAQSTCREALRRALKTRLPDYMVPTHLMFLERMPLTPNGKLDRKGLPRPD

SEQ ID NO: 44 - DNA, 1920 bp, Artificial Sequence
  Description of Artificial Sequence: Synthetic polynucleotide
actagtggaagccttgcagccggagcgcaatgccagccacaacccactgttccaggtgctgttcaaccatcagagcgagatacgctcggtgacgcccgaggttcagttggaggacctgcgtctggaaggcctggcctgggacggccagactgcgcagttcgacctgacgctggatattcaggaagacgaaaacggcatctgggcctccttcgactatgccaccgatctgttcgacgcctccaccgtggaacgcctggccggccattggcgcaatctcctgcgcggcatcgtggccgaaccgggccggccggtcgccgagttgccgctgttgctggacgaggagcgcgattgcctgtcgcgggcctgggcagagaacgccgacgagggtgggttgccgcccctggtccagttgcagatccaggagcaggcccgtctgcgtccgcaggcgcaagcactggcgctggaggggcaggccttgagctacgccgagctcaacgcccgcgccaatcgtctggctcactgcctgatagcgcgtggcgtcggtcccgatgtgctggtgggaatcgccgtcgagcgctcgctggacatggtggtcggtctgctggcgatcctcaaggccggtggtgcctatgtgccgctggacccgacctatccgcaggaccgtttgcgtcacatgctcgaggacagcgccgtcggcctgttgctcagccaggagcatttgctgcccgggctgcctttgcacgaagggctggaggtgctctccatcgaccgcctggaacgggacgcatcggtgtctacggatgatccggtggtgaacctgcggccggagaacctggcctatgtgatctacacctccggctccaccggaaaacccaagggcgtggccatcagccatgcggcgcttgcgcagttctcgcgtatcgccagtggttattccgcgctcaccccggaggatcggatattgcagttcgccaccctgagcttcgacggcttcgtcgaacagctctatccggcgctgacccgtggtgcctgcgtggtcctgcgtggcggcgacctctgggataccggtgagctgtatcggcagatagtcgagcagggcgtgacccttgccgacctgcccacggcgtactggaacctgttcctgctcgatgccctggccgagccacggcgttcctacggtgccttgcggcagatccacatcggtggcgaagccatgccactggaggggccgaagctctggcggcaagccggcatgggccgggtgaggttgctcaatacctatggaccgaccgaggccacggtggtgtccagcgtcttcgattgttccgccgagaacgcccgggtgggcaatgccagtcctatcggccaggcgctacccggccgtacgttgctggtgctggatgaacatctcggcctactgcccgtagggccggtaggcgagctttatatcgccagccgtgccgggctggcccgtgcctaccacgatcggcccggcttgaccgccgagcgcttcttgcccgaccccttcggcgaaccgggctcaaggctctaccggaccggcgacctggcgcgccgacgcggtgacggcgtgatcgagtacatggggcgtgccgaccatcaggtgaagatccgcggcttccgcatcgagctgggggaggtcgaagcccgcctcctggacttggagggaatacgcgaagcggcggctcttgcgctggacggtcaactggtggcctacctggtggctgaggggggcgaggacgaaactcgccagccggctttgcgcgagcgtatccgcacagcgctacgggcctcgctaccggactacatggtgccctcgcacctgctgttcctcgagcggatgccgctcagtccaaatggcaagctggaccgtcgggcgctgccgaagccggatgcggccgc

SEQ ID NO: 45 - protein, 637 aa, Artificial Sequence
  Description of Artificial Sequence: Synthetic polypeptide
LVEALQPERNASHNPLFQVLFNHQSEIRSVTPEVQLEDLRLEGLAWDGQTAQFDLTLDIQEDENGIWASFDYATDLFDASTVERLAGHWRNLLRGIVAEPGRPVAELPLLLDEERDCLSRAWAENADEGGLPPLVQLQIQEQARLRPQAQALALEGQALSYAELNARANRLAHCLIARGVGPDVLVGIAVERSLDMVVGLLAILKAGGAYVPLDPTYPQDRLRHMLEDSAVGLLLSQEHLLPGLPLHEGLEVLSIDRLERDASVSTDDPVVNLRPENLAYVIYTSGSTGKPKGVAISHAALAQFSRIASGYSALTPEDRILQFATLSFDGFVEQLYPALTRGACVVLRGGDLWDTGELYRQIVEQGVTLADLPTAYWNLFLLDALAEPRRSYGALRQIHIGGEAMPLEGPKLWRQAGMGRVRLLNTYGPTEATVVSSVFDCSAENARVGNASPIGQALPGRTLLVLDEHLGLLPVGPVGELYIASRAGLARAYHDRPGLTAERFLPDPFGEPGSRLYRTGDLARRRGDGVIEYMGRADHQVKIRGFRIELGEVEARLLDLEGIREAAALALDGQLVAYLVAEGGEDETRQPALRERIRTALRASLPDYMVPSHLLFLERMPLSPNGKLDRRALPKPD

SEQ ID NO: 46 - DNA, 1893 bp, Artificial Sequence
  Description of Artificial Sequence: Synthetic polynucleotide
actagtggaagccttgcagccggagcgcaatgccagccacaacccactgttccaggtgctgttcaaccatcagagcgagatacgctcggtgacgcccgaggttcagttggaggacctgcgtctggaaggcctggcctgggacggccagactgcgcagttcgacctgacgctggatattcaggaagacgaaaacggcatctgggcctccttcgactatgccaccgatctgttcgacgcctccaccgtggaacgcctggccggccattggcgcaacctgttgcgcggcatcgtcgccaatgcgggtcagcgtattgctgaggtgccaatgcttgacgctgccgaacagcagcagattgttcgcgactggaacgccacggctgccgatttccctggtgagcactgcctgcacagcctgatcgaagcccaggtacaggctacgccggacgctccggcactgatttttgcggctgaacaactgagctatgcgcaacttaacgcccgcgctaatcagcttgcccatcgcttgcgtgaggcgggtgttggcccggatgtgctggtggggatttgtgtcgagcgcagcgtggatatggtcattggtctgctggcgatcatcaaggccggtggcgcttacgtgccgctggacccggattaccctgaagatcgtttggcctacatgatgcaggacagcggcattggcttgctgttgacccagagtgcgctgctacagggcctgccggttcaggtgcagagcctttgtctggatcaggagggcgattggcttgacggttacagcaccgccaacccgatcaacctcagtcacccgcagaacctggcatacgtaatttacacctccggttcgaccggcaagcccaagggcgccggcaacagccatcgcgccctggtcaaccgtttgcactggatgcagaaggcttacgcactggatggcagcgatacggtattgcagaaaaccccgttcagtttcgatgtctcggtgtgggaattcttctggccgctgctgaccggagcacgtttggccgtggcgttgccgggcgatcatcgcgatccggagcggctggtgcagaccatccgcgaacatcaggtcacgacgctgcactttgtcccgtcgatgctccaggcgtttctgactcatccgcaggtagaaggctgtaacagcctgcgtcgtgtggtgtgcagcggcgaagcactgccttccgaactggccggtcaggtgctcaagcgtctgccgcagacgggtttgttcaacctgtacggcccgaccgaagcggctatcgacgtgacgcattggacctgcaccaaagacgacgtgctcagcgtgccgattggtcgacctatcgataacctgaaaacccatatcctcgacgacggattgctgcctgccgcgcagggcgtctcggcagagctgtacctgggcggtatcggtctggcgcggggttatcacaatcgcgcggcgctgacggctgaacgctttgtgccggatcctttcgacgagcagggcgggcgtctttaccggaccggggatctggcgcgttatcgcgatgaaggcgttatcgaatacgccgggcgtatcgaccatcaggtgaaaattcgcggcctgcgtatcgagctgggcgagatcgaagccagcctgctggagcacggcagcgttcaggaagcagtggtcatcgacgttgacggcccatccggcaagcagctggcagcctatctggtggctgagcacagtggcgataacctgcgtgatgcactcaaggtgtatctcaaggaaacactgcccgattacatggtgccgacccacttcgtctggctggcaagcatgcccctgagcgccaacggcaagctggatcgcaaagccctgccgacaccagacgcggccgc

SEQ ID NO: 47 - protein, 628 aa, Artificial Sequence
  Description of Artificial Sequence: Synthetic polypeptide
LVEALQPERNASHNPLFQVLFNHQSEIRSVTPEVQLEDLRLEGLAWDGQTAQFDLTLDIQEDENGIWASFDYATDLFDASTVERLAGHWRNLLRGIVANAGQRIAEVPMLDAAEQQQIVRDWNATAADFPGEHCLHSLIEAQVQATPDAPALIFAAEQLSYAQLNARANQLAHRLREAGVGPDVLVGICVERSVDMVIGLLAIIKAGGAYVPLDPDYPEDRLAYMMQDSGIGLLLTQSALLQGLPVQVQSLCLDQEGDWLDGYSTANPINLSHPQNLAYVIYTSGSTGKPKGAGNSHRALVNRLHWMQKAYALDGSDTVLQKTPFSFDVSVWEFFWPLLTGARLAVALPGDHRDPERLVQTIREHQVTTLHFVPSMLQAFLTHPQVEGCNSLRRVVCSGEALPSELAGQVLKRLPQTGLFNLYGPTEAAIDVTHWTCTKDDVLSVPIGRPIDNLKTHILDDGLLPAAQGVSAELYLGGIGLARGYHNRAALTAERFVPDPFDEQGGRLYRTGDLARYRDEGVIEYAGRIDHQVKIRGLRIELGEIEASLLEHGSVQEAVVIDVDGPSGKQLAAYLVAEHSGDNLRDALKVYLKETLPDYMVPTHFVWLASMPLSANGKLDRKALPTPD

SEQ ID NO: 48 - DNA, 1929 bp, Artificial Sequence
  Description of Artificial Sequence: Synthetic polynucleotide
actagtggaagccttgcagccggagcgcaatgccagccacaacccactgttccaggtgctgttcaaccatcagagcgagatacgctcggtgacgcccgaggttcagttggaggacctgcgtctggaaggcctggcctgggacggccagactgcgcagttcgacctgacgctggatattcaggaagacgaaaacggcatctgggcctccttcgactatgccaccgatctgttcgacgcctccaccgtggaacgcctggccggccattggcgcaacctgttgcgcggcatcgtcgccgacccacggcagaatctcagccaattaaacctgctggacaacgccgaacggcaacagattcttcaactgtggaaccagagcgacgccggcttctcggccaagcgcctggtgcacgagttggtggccgaccgcgccggggaaacccccgaggcggtggcggtgaaatttggcgagcaacagctgacttacggcgagctggaccgccaggccaaccgcctggcccatgcattgatcgcccgtggcgtcggccccgaagtgcgcgtggcgattgccatgccacgcagcgccgagatcatggtggcgttcctggcagtgatgaaagccggtggcgtctacgtgccgctggacatcgaatacccgcgtgaccgcctgctgtacatgatgcaggacagccgcgcccgattgctgttgacccattcggcggtgcaacagcgcttgccgattccagacggcctggaagcccttgccgtggaccaggcgcaagcctggtccgctgacgacgacaccgcacccgaggtggcgctggacggcgacaacctggcctacgtgatctacacctccggctccaccggcatgcccaaaggcgtggcggtgtcccacggcccgttggtggcgcacatcattgccaccggcgagcgttatgaaacgtcgccggccgattgcgaactgcacttcatgtcgttcgccttcgacggctcccacgaaggctggatgcacccactgatcaacggcgcgagcgtgctgattcgcgatgacagcctgtggctgccggagtacacctaccagcagatgcatcgccatcacgtgaccatggccgtgtttccgccggtgtacctgcagcagctggccgaacatgccgaacgcgacggtaacccgccgaaggttcgtgtgtactgcttcggcggtgatgccgtggcccaggccagctatgacctggcgtggcgtgcactcaagccgacctacctgttcaacggctacggcccgaccgaaaccgtggtcacgccgttgctgtggaaagcccgccgtggtgacccgtgcggtgccgtctacgcgccgatcggcacactgctgggcaatcgcagcggctacgtattggacgcgcaactcaacctgcaacccatcggcgtagccggtgagttgtacctgggcggcgagggcgtggcccggggttacctggagcgtccggccctgaccgccgagcgcttcgtaccggacccgttcggcaagcccggcagccgcgtgtatcgcagcggcgacttgacccgtggccgtccggatggcgtggtggattacctcggccgtgtcgaccatcaggtgaaaatccgtggcttccgtattgagctgggcgagatcgaagcgcgcctgcgcgagcaggacagtgtcggcgaaaccgtggtggtggcccaggaagggccgagcggcaagcaactggtcgcctatgtggtgccgctggatccgttgctcgtcgacgacgccgtggcgcagtcgacctgccgcgaagccttgcgccgcgccctgaaaacccgcttgccggactatatggtgcccacgcacctgatgttccttgagcgcatgccgctgacgccgaacggcaagctcgaccgcaagggcctgccgcgcccggatgcggccgc

SEQ ID NO: 49 - protein, 640 aa, Artificial Sequence
  Description of Artificial Sequence: Synthetic polypeptide
LVEALQPERNASHNPLFQVLFNHQSEIRSVTPEVQLEDLRLEGLAWDGQTAQFDLTLDIQEDENGIWASFDYATDLFDASTVERLAGHWRNLLRGIVADPRQNLSQLNLLDNAERQQILQLWNQSDAGFSAKRLVHELVADRAGETPEAVAVKFGEQQLTYGELDRQANRLAHALIARGVGPEVRVAIAMPRSAEIMVAFLAVMKAGGVYVPLDIEYPRDRLLYMMQDSRARLLLTHSAVQQRLPIPDGLEALAVDQAQAWSADDDTAPEVALDGDNLAYVIYTSGSTGMPKGVAVSHGPLVAHIIATGERYETSPADCELHFMSFAFDGSHEGWMHPLINGASVLIRDDSLWLPEYTYQQMHRHHVTMAVFPPVYLQQLAEHAERDGNPPKVRVYCFGGDAVAQASYDLAWRALKPTYLFNGYGPTETVVTPLLWKARRGDPCGAVYAPIGTLLGNRSGYVLDAQLNLQPIGVAGELYLGGEGVARGYLERPALTAERFVPDPFGKPGSRVYRSGDLTRGRPDGVVDYLGRVDHQVKIRGFRIELGEIEARLREQDSVGETVVVAQEGPSGKQLVAYVVPLDPLLVDDAVAQSTCREALRRALKTRLPDYMVPTHLMFLERMPLTPNGKLDRKGLPRPD

SEQ ID NO: 50 - DNA, 1890 bp, Artificial Sequence
  Description of Artificial Sequence: Synthetic polynucleotide
actagtggaagccttgcagccggagcgcaatgccagccacaacccactgttccaggtgctgttcaaccatcagagcgagatacgctcggtgacgcccgaggttcagttggaggacctgcgtctggaaggcctggcctgggacggccagactgcgcagttcgacctgacgctggatattcaggaagacgaaaacggcatctgggcctccttcgactatgccaccgatctgttcgacgcctccaccgtggaacgcctggccggccattggcgcaacctgttgcgcggcatcgtcgcccaacctgggcagcgcctgggggacttgccgctgctggcggcctccgagcagaacaagctgctgcacgaatgggccccggcgtctgtcgagttcccgagcgagcacggtgtgcatcaacgggttgaggcccaggcgcggaaaaaccctgaagccgaagccctgttgtttgctgggcaaagcctgaactaccaggcactcaatgcccgggccaaccgcctggcgcacaagttgatcgaattgggcgttgggcctgaggtccgggtcggggtggccatgcagcgcaccccggagatggtcgtggccttgctggcagtgctcaaggccggtggcgcctatgtgccgctggacccggattatccacaggatcgcctggcccatatgctgcgtgacagccaggcgcagatcctgctgaccgagagcgcgttattgtcgctgctgccggcggtggagtccctgcaaaccctgcaactggatgcgcaaccgggctggctggacggctattcgccggacaacccggcgccgcgagcgactgcggacaacctggcctatgtgatctacacctcgggttccaccggcttgcccaagggcgtggcgattgcccatcgcaacgtgctggcgctgatcgattggtcgagccgggtgtacagcgccgatgacctgcaaggggtgctggcttcgacctcgatctgcttcgacctgtcggtgtgggagctgttcgtcaccctgtccagcggcggttttatcgtcctggcgcgcaacgccctggagttgccggagctggtggaccgcgaccgggtgcggctgatcaataccgtgccgtcggcgattgccgccttgcagcgcagcgggcagattccgcccggtgtgcggatcatcaacctggcgggggaaccactgaagcaggcgctggtggatagcctgtaccagcaaccgggcctgcaacacgtctacgacctctacggtccttcggaagacaccacctactcgacctatacccgtcgtgaggccggtggccaggccaatatcggtcgcgccatcagcaatacccagagctatatcttgagcccggatctgcagccggtgccggtgggcagcgccggcgagttgtacctggccggcgccggggtcacccgcggctacctggcgcgtccggggctgaccgccgagaagttcgtgcccaatccgttctccagcgacggtggccgggtctaccgcaccggcgacctgacccgctatcgcgccgatggggtgatcgagtacatcggccgcatcgaccatcaggtgaaggtccgcggtttccgtatcgaactgggtgaaatcgaagcgcgactggtgcagcaggccgcggtgcgcgaagcctttgtcctggcccaggacggcgacaacggccagcaactggtggcctatatcgtgccgagcgaaaccaccgaggctatcgaagcgcaggccgcgctccgggaaaacatcaaggcggccctgaaagcgcatctgccggactacatggtgccgacctacctgctgttcctcgaagcgctgccgctgacgccgaacggcaagctcgaccgcaaggccctgcccaaggtcgacgcggccgc

SEQ ID NO: 51 - protein, 627 aa, Artificial Sequence
  Description of Artificial Sequence: Synthetic polypeptide
LVEALQPERNASHNPLFQVLFNHQSEIRSVTPEVQLEDLRLEGLAWDGQTAQFDLTLDIQEDENGIWASFDYATDLFDASTVERLAGHWRNLLRGIVAQPGQRLGDLPLLAASEQNKLLHEWAPASVEFPSEHGVHQRVEAQARKNPEAEALLFAGQSLNYQALNARANRLAHKLIELGVGPEVRVGVAMQRTPEMVVALLAVLKAGGAYVPLDPDYPQDRLAHMLRDSQAQILLTESALLSLLPAVESLQTLQLDAQPGWLDGYSPDNPAPRATADNLAYVIYTSGSTGLPKGVAIAHRNVLALIDWSSRVYSADDLQGVLASTSICFDLSVWELFVTLSSGGFIVLARNALELPELVDRDRVRLINTVPSAIAALQRSGQIPPGVRIINLAGEPLKQALVDSLYQQPGLQHVYDLYGPSEDTTYSTYTRREAGGQANIGRAISNTQSYILSPDLQPVPVGSAGELYLAGAGVTRGYLARPGLTAEKFVPNPFSSDGGRVYRTGDLTRYRADGVIEYIGRIDHQVKVRGFRIELGEIEARLVQQAAVREAFVLAQDGDNGQQLVAYIVPSETTEAIEAQAALRENIKAALKAHLPDYMVPTYLLFLEALPLTPNGKLDRKALPKVD

SEQ ID NO: 52 - DNA, 1881 bp, Artificial Sequence
  Description of Artificial Sequence: Synthetic polynucleotide
actagtggaagccttgcagccggagcgcaatgccagccacaacccactgttccaggtgctgttcaaccatcagagcgagatacgctcggtgacgcccgaggttcagttggaggacctgcgtctggaaggcctggcctgggacggccagactgcgcagttcgacctgacgctggatattcaggaagacgaaaacggcatctgggcctccttcgactatgccaccgatctgttcgacgcctccaccgtggaacgcctggccggccattggcgcaacctgttgcgcggcatcgtcgccgacacccagcagcgtatcggccagttaccgttgctggatgaccaggaacagcaagcagtgatccacgactggaacgctaccgctcgcgattacccgtcgcagcgttgcgtgcatcagttgattgaagcacaggtcgcgcgcacgccggatgcgccggccctggtgtttggccagcagcgtctgagctacgcgcaactgaaccgccgcgccaaccgcctggcccatcgtttgatcgcggctggcgtcgggccggacgtgctggtgggcctggcgctggagcgttccatcgaaatggtggttggcctgctggcggtgctcaaggccggtggcgcctatgtgccgctggaccccgagtatccacgtgagcgcctggcgtacatgcttgaagacagcggggtgaagttgctgctgactcaagcgcacctgctgcaacagctccccataccccagggcctggatcatctggtgctgggtgagtcgtggttcgaaggctacagcgatagcaacccaggtatcgtcctggacggcgaaaacctggcctatgtgatctacacctccggctccaccggccagcccaaaggcgcgggcaaccggcattcggccctgaccaaccgcctgcaatggatgcaggaagcctatggcctcggtgccagcgacacggtgctgcaaaagaccccgttcagctttgacgtgtcggtgtgggagttcttctggccgctgatgagcggtgcgcgcctggtggttgcagcgccgggggatcatcgcgacccggcccggttgatcagtgtgatcaccgccgagcaggtcactacagtgcacttcgtgccctcgatgttgcaggcgttcctccaggatgcggcggtgacccgttgccaaagcctgcagcgcattgtgtgcagcggcgaggcgctaccggtcgacgcccagcagcaagtctttgccaaactgccgcaagccggcctctacaacctgtatggcccaaccgaagccgccatcgacgtgacccactggacctgcgtcgacgaggggcacgacacggtgccgatcggcgaaccgattgccaacctgcgcacccatgtgctggatgccgacctgtcacccgtgccggtcggagttgccggtgagctgtacctgggcggcgcaggcttggcgcgtagttatcatcggcgtccgggcttgaccgccgagcgcttcgtgccttgcccgttccaccctggggcgcggctgtaccgcagcggcgaccgggtacgccagcgtgccgacggcgtcatcgaatacctgggccgcctcgatcaccaggtcaagctgcgcggcttgcgcatcgagctgggtgaaatcgaagcgcgcctgctggaacacccggctgtgcgtgaagcgagcgtgcaggtggttgatggcaagcaactggtggcttatgtggtgctgcaaccgaacggtgacgattggcgcgagcgcttgagcacccacctggccagccacctgccggactatatggtcccggcgcaatgggtagtgctggagcacatgccgctgagccccaacggcaaactggaccgcaaggcgctgcccaagcccgaggcggccgc

SEQ ID NO: 53 - protein, 624 aa, Artificial Sequence
  Description of Artificial Sequence: Synthetic polypeptide
LVEALQPERNASHNPLFQVLFNHQSEIRSVTPEVQLEDLRLEGLAWDGQTAQFDLTLDIQEDENGIWASFDYATDLFDASTVERLAGHWRNLLRGIVADTQQRIGQLPLLDDQEQQAVIHDWNATARDYPSQRCVHQLIEAQVARTPDAPALVFGQQRLSYAQLNRRANRLAHRLIAAGVGPDVLVGLALERSIEMVVGLLAVLKAGGAYVPLDPEYPRERLAYMLEDSGVKLLLTQAHLLQQLPIPQGLDHLVLGESWFEGYSDSNPGIVLDGENLAYVIYTSGSTGQPKGAGNRHSALTNRLQWMQEAYGLGASDTVLQKTPFSFDVSVWEFFWPLMSGARLVVAAPGDHRDPARLISVITAEQVTTVHFVPSMLQAFLQDAAVTRCQSLQRIVCSGEALPVDAQQQVFAKLPQAGLYNLYGPTEAAIDVTHWTCVDEGHDTVPIGEPIANLRTHVLDADLSPVPVGVAGELYLGGAGLARSYHRRPGLTAERFVPCPFHPGARLYRSGDRVRQRADGVIEYLGRLDHQVKLRGLRIELGEIEARLLEHPAVREASVQVVDGKQLVAYVVLQPNGDDWRERLSTHLASHLPDYMVPAQWVVLEHMPLSPNGKLDRKALPKPE

SEQ ID NO: 54 - DNA, 1878 bp, Artificial Sequence
  Description of Artificial Sequence: Synthetic polynucleotide
actagtggaagccttgcagccggagcgcaatgccagccacaacccactgttccaggtgctgttcaaccatcagagcgagatacgctcggtgacgcccgaggttcagttggaggacctgcgtctggaaggcctggcctgggacggccagactgcgcagttcgacctgacgctggatattcaggaagacgaaaacggcatctgggcctccttcgactatgccaccgatctgttcgacgcctccaccgtggaacgcctggccggccattggcgcaacctgttgcgcggcatcgtcgccgattgcgacggccgggttggcgaactgccattgctggacgatgcccaatggcagcaacgggtgcacgcctggaataacacacaccaggcgttcctaccggatgtgggtgtgcatcgcttgctggaagcccaggcgcaggcccgaccggacgcaacggcgctggtctgcaatggccaggcgttgagctacgcacagctgaaccggcgtgccaatcgcctggcccatcgcttgcgcgcggcgggtgtcggcccggacgtgctggtggctgtcgccctggatcgttcggtggacatggtgctggccttgctggcgaccctcaaggcgggtggtgcctatgtgccgcttgacccacagttcccggccgaccggctggcattcatgctcgaagacagccgcgcacgcgtgctgttgaccgccggcgacctgcaccaacgcctgcccgtggcagccgaccagcaggtgctgttcatcagcgagcaggaggacgcgcgccacagcagtgataacccgcacgtcgagctgagcggcgaacacctggcttacgtgatctacacctccggttccactggcaagcccaagggtgtgatggtgcgtcatggcgccctgagcagcttcacccaaggcatggccgacaccctgagcatcgacgccgatgcgcggctgctgtcgttgaccacgttttccttcgatattttcgccctcgagctctacgtccccctgtcagtaggcgccacggtggtgctggcggataaggaagtgtccctggaccctgaggcgatcctgagcctgctgcatgatcaggcgatcaacgtggtgcaagccacgccttcaacctggcgcatgctgctggacagcgaacgccgcgccgtgttgcacggggtcaagtgcctgtgcggcggcgaagcgctgccggccgacctggcccaacgcatgctggcccagcaaggcacggtgtggaacctgtacggcccaacggaaaccaccatctggtcggcggcccacccgctggttgaaccgttgccttttgtcggtcggccgatagccaacacctcgctctttatcctcaatgccgaactcaccctgagcccggtaggcaccagcggcgaactgctgatcggcggtgtcggcctggcacggggataccacggccgggcggcaatgaccgccgagcgttttgtccccaacccttttgcgcgcaacggtgagcggctgtatcgcacaggcgacctggcgcgttatcgggtggatggcgtggtcgagtacatcggtcgtgtcgaccatcaggtcaaggtgcgcgggttccgtatcgagctgggggagattgaggcgtgtctgcgtgagcagagtgatgtgcgcgaagccgtggtagtggctgagaatgaccaactgttggcttatctggtgacgcataccgcgacctcggaagctgatcagggcgccttgcgcgaggcactcaaagccgcgctgcgcgacgtgctgccggactacatggtgccggcgcatatgctgttcctcgcacgcctaccgcttacgccgaacggcaagctggaccgcaaggcgctgcctaagccggacgcggccgc

SEQ ID NO: 55 - protein, 623 aa, Artificial Sequence
  Description of Artificial Sequence: Synthetic polypeptide
LVEALQPERNASHNPLFQVLFNHQSEIRSVTPEVQLEDLRLEGLAWDGQTAQFDLTLDIQEDENGIWASFDYATDLFDASTVERLAGHWRNLLRGIVADCDGRVGELPLLDDAQWQQRVHAWNNTHQAFLPDVGVHRLLEAQAQARPDATALVCNGQALSYAQLNRRANRLAHRLRAAGVGPDVLVAVALDRSVDMVLALLATLKAGGAYVPLDPQFPADRLAFMLEDSRARVLLTAGDLHQRLPVAADQQVLFISEQEDARHSSDNPHVELSGEHLAYVIYTSGSTGKPKGVMVRHGALSSFTQGMADTLSIDADARLLSLTTFSFDIFALELYVPLSVGATVVLADKEVSLDPEAILSLLHDQAINVVQATPSTWRMLLDSERRAVLHGVKCLCGGEALPADLAQRMLAQQGTVWNLYGPTETTIWSAAHPLVEPLPFVGRPIANTSLFILNAELTLSPVGTSGELLIGGVGLARGYHGRAAMTAERFVPNPFARNGERLYRTGDLARYRVDGVVEYIGRVDHQVKVRGFRIELGEIEACLREQSDVREAVVVAENDQLLAYLVTHTATSEADQGALREALKAALRDVLPDYMVPAHMLFLARLPLTPNGKLDRKALPKPD

SEQ ID NO: 56 - DNA, 1929 bp, Artificial Sequence
  Description of Artificial Sequence: Synthetic polynucleotide
actagtggaagccttgcagccggagcgcaatgccagccacaacccactgttccaggtgctgttcaaccatcagagcgagatacgctcggtgacgcccgaggttcagttggaggacctgcgtctggaaggcctggcctgggacggccagactgcgcagttcgacctgacgctggatattcaggaagacgaaaacggcatctgggcctccttcgactatgccaccgatctgttcgacgcctccaccgtggaacgcctggccggccattggcgcaacctgttgcgcggcatcgtcgccaacccacgacagcagctcagccagttaagcctgctggacgcgaccgaacaacaacagatcctgcaactgtggaaccgcacggagtctggcttttcggccgagcgcctggtgcacgaattggtcggcgatcgcgcccgcgaaactccggacgcggtggcggttaaattcgacgcgcaaaccctgacttacggtgaactggatcgccaggccaaccgcctggcccatgccttgatcgcccgtggcgtcggcccggaagtgcgggtggctatcgccatgccgcgcagtgccgagatcatggtggcgttcctggcggtgatgaaagccggcggtgtgtatgtgccgctggatatcgaatacccacgtgatcgcctgctgtacatgatgcaagacagccgctcgaaaatgctgttgacccattcggccgtgcaacaccggttgccgatcccggacggcctcgacgtcttggcggtggatcaggtgcaagcctggtcggattacagcgatacggccccgactgtggcgctggacggcgacaaccttgcctacgtgatctacacctccggctccaccggtttgcccaagggcgtggcggtgtcacacggcccgctggtggcgcatatcatcgctaccggcgagcgctatgaaacctcgccggccgattgcgagctgcacttcatgtcgttcgctttcgacggctcccacgaaggctggatgcacccgctgatcaacggcgccagcgtgttgatccgtgacgacagcctgtggctgccggaatacacctacgagcagatgcatcgccataacgtgaccatggcggtgttcccaccggtgtacctgcaacagttggccgaacatgccgagcgcgacggcaacccgccggcggtgcgggtgtactgctttggcggtgatgccgtggctcaagccagctacgacctggcgtggcgcgcgctgaaacccaagtacctgttcaacggctatggcccgaccgaaaccgtggtcacaccgctgttgtggaaggcacgcaagggcgacccttgcggcgccgtctacgcgcccatcggcactttgttgggtaaccgcagtggctacgtgttggatgcgcaactgaacctgcaacccatcggcgtggccggcgagttgtacctgggcggcgagggcgtggcccggggttatctggagcgtccggcgttaaccgccgaacgcttcgtgccggacccgttcggcaagcccggcagtcgcgtatatcgcagcggcgaccttacccgcgggcgtccggatggcgtagtggattacctggggcgtgtggaccatcaggtgaagatccgcggtttccgtatcgaactgggggaaatcgaagcgcgcttgcgtgagcaagccagtgtcggtgaaaccgtggttgtcgcccaagaggggccgaccggtaagcaactggtggcctatgtcgtaccactggaccggacgctcctggatgatgctgtcgctcaatccaccggtcgcgaaaccttgcggcgcgccttgaaaacccgcttgccggactacatggtgccgacgcatttgatgttccttgagcgtatgccgctgacccccaacggcaagctcgaccgcaagggcttgccgctgccggatgcggccgc

SEQ ID NO: 57 - protein, 640 aa, Artificial Sequence
  Description of Artificial Sequence: Synthetic polypeptide
LVEALQPERNASHNPLFQVLFNHQSEIRSVTPEVQLEDLRLEGLAWDGQTAQFDLTLDIQEDENGIWASFDYATDLFDASTVERLAGHWRNLLRGIVANPRQQLSQLSLLDATEQQQILQLWNRTESGFSAERLVHELVGDRARETPDAVAVKFDAQTLTYGELDRQANRLAHALIARGVGPEVRVAIAMPRSAEIMVAFLAVMKAGGVYVPLDIEYPRDRLLYMMQDSRSKMLLTHSAVQHRLPIPDGLDVLAVDQVQAWSDYSDTAPTVALDGDNLAYVIYTSGSTGLPKGVAVSHGPLVAHIIATGERYETSPADCELHFMSFAFDGSHEGWMHPLINGASVLIRDDSLWLPEYTYEQMHRHNVTMAVFPPVYLQQLAEHAERDGNPPAVRVYCFGGDAVAQASYDLAWRALKPKYLFNGYGPTETVVTPLLWKARKGDPCGAVYAPIGTLLGNRSGYVLDAQLNLQPIGVAGELYLGGEGVARGYLERPALTAERFVPDPFGKPGSRVYRSGDLTRGRPDGVVDYLGRVDHQVKIRGFRIELGEIEARLREQASVGETVVVAQEGPTGKQLVAYVVPLDRTLLDDAVAQSTGRETLRRALKTRLPDYMVPTHLMFLERMPLTPNGKLDRKGLPLPD

SEQ ID NO: 58 - DNA, 1917 bp, Artificial Sequence
  Description of Artificial Sequence: Synthetic polynucleotide
actagtggaagccttgcagccggagcgcaatgccagccacaacccactgttccaggtgctgttcaaccatcagagcgagatacgctcggtgacgcccgaggttcagttggaggacctgcgtctggaaggcctggcctgggacggccagactgcgcagttcgacctgacgctggatattcaggaagacgaaaacggcatctgggcctccttcgactatgccaccgatctgttcgacgcctccaccgtggaacgcctggccggccattggcgcaacctgttgcgcggcatcgtcgccaatcccgagctggccgtgggggaactgccgctgctcgacgcggaagaactccggcaacagctccaaggctggaatgccacggcccgggactatggctgcgagaccgtccaccgcctgttcgaggcccaggtcgcgtcgcaacccgacgcgccggccctggcgttcggcacggaacatctgagctatgcccaactcaacgcgcgggcgaatcgcctggcgcataagctgcgttccctcggggtcggccccgaaagcctcgtcggcgtggcgtgcgagcgcagcgtggaactggtggtcggtctgctggccgtgctgaaagccgggggggcgtatgtcccgttcgaccccgaatatccccgggaccgcctcgcgtatctcttcgatgactccgccatccggctcctcctcacccaatcgcacctgctgggggagctcccgctgcccgaaggcgtcacctccctgtgcctcgatcaggactcggacgcgctcgaagccttctccggggcgaatcccgaagtgccgctggcccccaacaatctcgcgtacgtgatctacacctcggggtccaccgggaagccgaaaggggcgggcaatacgcatggggcgctccataatcgcctcgcctggatgcaggaggcctatgcgctggatgcgggggattccgtcctccaaaaaacccccttctcgttcgatgtctcggtgtgggaattcttctggcccctcatggtcggcgcccgtctcgccgtggcggccccgggtgatcatcgggacccctcgcgcctgctggccctgatcgaggcgcaccgggtgaccaccctccatttcgtcccgtcgatgctgcaagccttcgtgagccaactcgccctcgaggaacaaggggcgcgccaatgcgcgtccctgaaacgcatcgtctgcagcggggaagcgctgcccgcggaactgcagggccaagtcttcgcggagctgcccggcgtgggcctgttcaatctgtatggccccaccgaggccgcgatcgatgtgacgcattggacgtgccgcgaagaggggcgcgacagcgtccccatcgggcaaccgatcgccaatctcgccacgcacatcctggatgcccgtctgaatccggtcccggtgggtgtggccggcgaactgtatctggccggcgcggggctggcgcggggctatcatcggcgtgcgggcctgtccgccgaacgcttcgtcgccaaccccttcgcgcccggggagcgcatgtaccggacgggcgatctggcccggtatcgcaccgatggggtgatcgagtatctcgggcgcatcgatcaccaggtcaagatccgggggttccgcatcgaactgggcgagatcgaagcccgcctccaatcgcatgcgggggtccgcgaagccgtggtcgtggcggtcgatggcgcgtccgggaagcaactggtcgcctatctggtggccgccgaagcgggggccgaagagggcgcgctgcgcgagtccatcaaggcccacctcggggccacgctcccggattatatggtccccgcgcaattcgtgctgctgaccgcgatgccgctgtcccccaacgggaagctggaccgcaaggccctgcccaagcccgacgcggccgc

SEQ ID NO: 59 - protein, 636 aa, Artificial Sequence
  Description of Artificial Sequence: Synthetic polypeptide
LVEALQPERNASHNPLFQVLFNHQSEIRSVTPEVQLEDLRLEGLAWDGQTAQFDLTLDIQEDENGIWASFDYATDLFDASTVERLAGHWRNLLRGIVANPELAVGELPLLDAEELRQQLQGWNATARDYGCETVHRLFEAQVASQPDAPALAFGTEHLSYAQLNARANRLAHKLRSLGVGPESLVGVACERSVELVVGLLAVLKAGGAYVPFDPEYPRDRLAYLFDDSAIRLLLTQSHLLGELPLPEGVTSLCLDQDSDALEAFSGANPEVPLAPNNLAYVIYTSGSTGKPKGAGNTHGALHNRLAWMQEAYALDAGDSVLQKTPFSFDVSVWEFFWPLMVGARLAVAAPGDHRDPSRLLALIEAHRVTTLHFVPSMLQAFVSQLALEEQGARQCASLKRIVCSGEALPAELQGQVFAELPGVGLFNLYGPTEAAIDVTHWTCREEGRDSVPIGQPIANLATHILDARLNPVPVGVAGELYLAGAGLARGYHRRAGLSAERFVANPFAPGERMYRTGDLARYRTDGVIEYLGRIDHQVKIRGFRIELGEIEARLQSHAGVREAVVVAVDGASGKQLVAYLVAAEAGAEEGALRESIKAHLGATLPDYMVPAQFVLLTAMPLSPNGKLDRKALPKPD

SEQ ID NO: 60 - DNA, 1896 bp, Artificial Sequence
  Description of Artificial Sequence: Synthetic polynucleotide
actagtggaagccttgcagccggagcgcaatgccagccacaacccactgttccaggtgctgttcaaccatcagagcgagatacgctcggtgacgcccgaggttcagttggaggacctgcgtctggaaggcctggcctgggacggccagactgcgcagttcgacctgacgctggatattcaggaagacgaaaacggcatctgggcctccttcgactatgccaccgatctgttcgacgcctccaccgtggaacgcctggccggccattggcgcaacctgttgcgcggcatcgtcgcccaaccgaaaaccgccatcggcgacctgcaattgttggcgcccagcgaacacgatcagcaggaaaactggagcgccgcaccgtgcacaccggccagccaatggctgccggaactgctcggcgaacaggcccgcctgaccccggagcgtaccgcgctgatgtgggacggcggcagcctggacttcgctgaactgcacgcccaggccaaccgcctcgcgcattacctgcgcgacaaaggcgtcggcccggacgtgtgcgtggccatcgctgccgagcgctcgccgcagttgctgatcggcctgctggcgatcatcaaggccggcggtgcctacgtgccgctggacccggattaccccgccgaacgcctggcctacatgctcagggacagcggcgtggaattgctgctgacgcaaacccaattgcttgatcgcttgccggccaccgatggcgtcagcgtgattgccatggatgcgctgcacctggagaactggccgagccaggcaccgggtctgcatctgcacggcgacaacctcgcttacgtgatttacacctccggttccaccggccaaccgaagggcgtcggcaacacccacacggcccttgccgaacgcctgcaatggatgcagaacacctatcgcctgaacgataccgatgtgctgatgcaaaaagcgccgatcagtttcgacgtgtcggtgtgggaatgcttctggccgctgatcaccggtgcacgcttgctgatcgccggtcccggtgaacaccgcgatccgcaccgcatcgcgcagcttgttcagcaatacggcgtgaccacgctgcactttgtgccgccactgctttcgttgttcatcgacgagccgctcaccgccgaatgcaccagccttcgccgtgtgttctctggtggtgaagccttgccggcggaactgcgcaaccgcgttttggaacagctgccggcggtacaactgcacaaccgctatggcccgaccgaaaccgcgatcaacgtcacccattggcaatgcagcgcggccgatggtgagcgctcgccgattggccgtccgttgggcaacgtgatctgccgggtgctcgacagcgacctcaacccggtgccggccggtgtgccgggtgaactgtgcatcagcggcattggcctggcccgaggttatctgggccgtccgggcctgactgccgaacgctttgtcgtcgatccgttgagcgagcagggcgcacgtttgtaccgcaccggcgaccgtgcacgctggaccgccgagggcgtgatcgagtacctcggccgtctcgaccagcaggtcaaagtgcgcggctttcgcgttgagccggaagaaatcgaagcgcgtctgctggctcagaacggcgtcgcccaagcggtggtgctggtgcgcgaaacagcggccggggctcaactgatcggttactacaccgccactgcaaacagcgaagccgaagacacgcaaaccgcacgcctgaaaactgcgctggcggtcgagctgccggaatacatggtcccggcgcaactgatgcgcctgggcgaaatgcccctcagccccagcggcaagctcgaccgtcgcgccttgcccgaaccccgggcggccgc

SEQ ID NO: 61 - protein, 629 aa, Artificial Sequence
  Description of Artificial Sequence: Synthetic polypeptide
LVEALQPERNASHNPLFQVLFNHQSEIRSVTPEVQLEDLRLEGLAWDGQTAQFDLTLDIQEDENGIWASFDYATDLFDASTVERLAGHWRNLLRGIVAQPKTAIGDLQLLAPSEHDQQENWSAAPCTPASQWLPELLGEQARLTPERTALMWDGGSLDFAELHAQANRLAHYLRDKGVGPDVCVAIAAERSPQLLIGLLAIIKAGGAYVPLDPDYPAERLAYMLRDSGVELLLTQTQLLDRLPATDGVSVIAMDALHLENWPSQAPGLHLHGDNLAYVIYTSGSTGQPKGVGNTHTALAERLQWMQNTYRLNDTDVLMQKAPISFDVSVWECFWPLITGARLLIAGPGEHRDPHRIAQLVQQYGVTTLHFVPPLLSLFIDEPLTAECTSLRRVFSGGEALPAELRNRVLEQLPAVQLHNRYGPTETAINVTHWQCSAADGERSPIGRPLGNVICRVLDSDLNPVPAGVPGELCISGIGLARGYLGRPGLTAERFVVDPLSEQGARLYRTGDRARWTAEGVIEYLGRLDQQVKVRGFRVEPEEIEARLLAQNGVAQAVVLVRETAAGAQLIGYYTATANSEAEDTQTARLKTALAVELPEYMVPAQLMRLGEMPLSPSGKLDRRALPEPR

SEQ ID NO: 62 - DNA, 1899 bp, Artificial Sequence
  Description of Artificial Sequence: Synthetic polynucleotide
actagtggaagccttgcagccggagcgcaatgccagccacaacccactgttccaggtgctgttcaaccatcagagcgagatacgctcggtgacgcccgaggttcagttggaggacctgcgtctggaaggcctggcctgggacggccagactgcgcagttcgacctgacgctggatattcaggaagacgaaaacggcatctgggcctccttcgactatgccaccgatctgttcgacgcctccaccgtggaacgcctggccggccattggcgcaacctgttgcgcggcatcgtcgccgagccgcaacgcccggtcgccgccttgccgctgctgatgccggctgaatggcagcgcaccgtggtcgagtggaaccgcaccgaaatggacgtgccgcagcacctgacgttcgcccagttgtttgaacagcaggccgaacgcacgccgcagcgcgatgcgttgtgctttgaaggccagcgcctgagctacgccgaactgaatcgccgtgccaaccaggtcgcacattacctacgcgcccaaggggtggtcgccaattgcccggtggcgttgtgtgtggagcgttccctggagttgttgatcggcctgttgggcatcctgaaggccggtggcgcctatgtgccgctggaccctggctacccggccgaacgcttggcctacatgctcgaagatgcgcaacccgcgctgttcctcggccagcagggcctgcttgaacagttgggcggcgacttaccgcgcctgcgcctggacgccgatgccgcgctattggccgctcagcctgagagcaaccccgcagcattggccggcccggatgacctggcctacatcatgtacacctcgggctccacgggtaagcccaagggcaccctggtcacccacacgtcggtggtcaacctggcctgggcgcggatccatggcctgtatcgccgctacaccgaccagccgatgcgcaccagcttcaactattcgttcgcctttgatagctcggtggcggaattgattctgctgctcgacggccacagcctgtacctgacgccggaagacgtgcgctacgaccctgcagcactggcgcagttcttccaggaaacccgactggacgcgttcgaatgcaccccggcgcagcttaaaagcctgctcgaaaccgacggcgtgcgccgtggtgaaacctacctgccgcgcttcgtgctgtttggcggtgatgcggtggacgcgcaactgtggcagcgtttgccgtcgatcagcggcagccgtttcttcaatacctacggcccaaccgagtgcaccgtggacgccaccggatgcgcggtggacgacttcccgcaacggccgatcattggtcggccaatcgccaacgtacgcacctatgtgctggatgcgttcttgaatccgatgccggtgggtgtgcctggcgagctgcatatcggcggcgccggggtgaccctgggttacctcaaccgcgccgaacaaaccgccaaagtgtttatcaacgacccgttctcgccactgccgcaggcgcgcatgtacaagtccggtgacctggtgcgctggctgccggacggccagctggaatacctcgggcgcatggaccaccaggtgaaaatccgcggtttccgcgtcgagctgggcgagatcgaagccttgatcggcgcacaacccggcgtgcgccaggcggtggtactggcccgtgaagacgtacagggcgacaagcgcctggtggcgtacgtcacctgtgatcaaccggccgatatgaatgcctggcgtaaccgtcttggcgccgccctgcccgactacatggtgccgtcggcgtttgtggtgctggacgaactgccgctgaccgacaacggcaaactcaatcgcaaggccctgcccgcaccagatgcggccgc

SEQ ID NO: 63 - protein, 630 aa, Artificial Sequence
  Description of Artificial Sequence: Synthetic polypeptide
LVEALQPERNASHNPLFQVLFNHQSEIRSVTPEVQLEDLRLEGLAWDGQTAQFDLTLDIQEDENGIWASFDYATDLFDASTVERLAGHWRNLLRGIVAEPQRPVAALPLLMPAEWQRTVVEWNRTEMDVPQHLTFAQLFEQQAERTPQRDALCFEGQRLSYAELNRRANQVAHYLRAQGVVANCPVALCVERSLELLIGLLGILKAGGAYVPLDPGYPAERLAYMLEDAQPALFLGQQGLLEQLGGDLPRLRLDADAALLAAQPESNPAALAGPDDLAYIMYTSGSTGKPKGTLVTHTSVVNLAWARIHGLYRRYTDQPMRTSFNYSFAFDSSVAELILLLDGHSLYLTPEDVRYDPAALAQFFQETRLDAFECTPAQLKSLLETDGVRRGETYLPRFVLFGGDAVDAQLWQRLPSISGSRFFNTYGPTECTVDATGCAVDDFPQRPIIGRPIANVRTYVLDAFLNPMPVGVPGELHIGGAGVTLGYLNRAEQTAKVFINDPFSPLPQARMYKSGDLVRWLPDGQLEYLGRMDHQVKIRGFRVELGEIEALIGAQPGVRQAVVLAREDVQGDKRLVAYVTCDQPADMNAWRNRLGAALPDYMVPSAFVVLDELPLTDNGKLNRKALPAPD

SEQ ID NO: 64 - DNA, 1887 bp, Artificial Sequence
  Description of Artificial Sequence: Synthetic polynucleotide
actagtggaagccttgcagccggagcgcaatgccagccacaacccactgttccaggtgctgttcaaccatcagagcgagatacgctcggtgacgcccgaggttcagttggaggacctgcgtctggaaggcctggcctgggacggccagactgcgcagttcgacctgacgctggatattcaggaagacgaaaacggcatctgggcctccttcgactatgccaccgatctgttcgacgcctccaccgtggaacgcctggccggccattggcgcaacctgttgcgcggcatcgtcgccatgccacaggcgtcgctggctgatctgccattgttgagtgaatcggaggtggccgaggtcgaggcctggaacgccccaatacccgttccgaacagcattcagctcttgccggagcgtatcgctgagcaggcgcgcctgcgcccgacagccattgccctggtgcatggtcagcagcgcctgagcttcgccgagctggaagctcgcgccaattgtctggcccatcagctgatcgcccgtggcgtcggcgccgaggtgcgtgtcggggtggcgctggagcgcggtatcgagctgttcgtcgctctgctggcggtgctcaaggccggcggtgcctacgtgccgctggacccggattatcccggcgagcgtttgcgttatatgctcgaagacgccggggtgaagctgctgctgagccatcaggcggctctgccacgtttgcccgaggtggccggtatcgaggtgctcgacctcgatcatctgccgctgaacgatcagccggagcaggcgcccgaggtgaatattcaccacgagcaactggcctatctgatctacacctccggctctaccggcaagcccaagggcgttgcggtggctcatggcgcgattgccatgcattgccaggccatcggcgagcgttacgaactgaccgccgaggatcgcgaactgcacttcctctcggtcagtttcgacggcgcccacgagcgttggctaacgccactgagccacggtgcgcgggtggtaatccgcgaccagcaactgtggagcgtgcagcagacctacgactgcctgatcgaagaaggcatcagcgtggtggccttgccaccgagttacctgcgccagctggccgagtgggccgagcaatgcggcaaagcgcctggggtgaagacctattgcttcgccggcgaagccttcagccgtgagctgctgcagcaggtgattcgcagcctgcaaccgcaatggatcatcaacggctacggcccgaccgaaaccgtggtcacgccgaccatttggcgagtgccggcagccacggcggacttcgacacggcctatgcaccgattggtgatcgcgtcggggcgcgccagggttacgtgctggatgccgacctcaacctgttgccggtcggcgtggccggtgagctgtacctgggtggcctgctggcccgtggttatctggatcgccctggcgccaccgccgagcgcttcgtgcccaatccgtaccgccccggtgagcgcctgtaccgcaccggcgaccgtgtacggctcggcgctgatggccagttggaatacctgggccggctggatcagcagatcaagctgcgcggcttccgtatcgagatcggcgaagtcgaggcggcgctgaaagcctgcgcgggcgtcggcgaatcgctggtggtagttaaagacagcgcggcgggcaagcgcctggtgggctacgtcagcggccaggcgctgagcgagagtgagctgaaagcgcagctcaagcagcgcctgccttcgcatatggtgccgagtcatattctggcgctggagcgcctgccgctgctgcccaacggcaagctggatcggcagagtctgccggagccgcaggcggccgc

SEQ ID NO: 65 - protein, 626 aa, Artificial Sequence
  Description of Artificial Sequence: Synthetic polypeptide
LVEALQPERNASHNPLFQVLFNHQSEIRSVTPEVQLEDLRLEGLAWDGQTAQFDLTLDIQEDENGIWASFDYATDLFDASTVERLAGHWRNLLRGIVAMPQASLADLPLLSESEVAEVEAWNAPIPVPNSIQLLPERIAEQARLRPTAIALVHGQQRLSFAELEARANCLAHQLIARGVGAEVRVGVALERGIELFVALLAVLKAGGAYVPLDPDYPGERLRYMLEDAGVKLLLSHQAALPRLPEVAGIEVLDLDHLPLNDQPEQAPEVNIHHEQLAYLIYTSGSTGKPKGVAVAHGAIAMHCQAIGERYELTAEDRELHFLSVSFDGAHERWLTPLSHGARVVIRDQQLWSVQQTYDCLIEEGISVVALPPSYLRQLAEWAEQCGKAPGVKTYCFAGEAFSRELLQQVIRSLQPQWIINGYGPTETVVTPTIWRVPAATADFDTAYAPIGDRVGARQGYVLDADLNLLPVGVAGELYLGGLLARGYLDRPGATAERFVPNPYRPGERLYRTGDRVRLGADGQLEYLGRLDQQIKLRGFRIEIGEVEAALKACAGVGESLVVVKDSAAGKRLVGYVSGQALSESELKAQLKQRLPSHMVPSHILALERLPLLPNGKLDRQSLPEPQ

SEQ ID NO: 66 - DNA, 1989 bp, Artificial Sequence
  Description of Artificial Sequence: Synthetic polynucleotide
actagtggaagccttgcagccggagcgcaatgccagccacaacccactgttccaggtgctgttcaaccatcagagcgagatacgctcggtgacgcccgaggttcagttggaggacctgcgtctggaaggcctggcctgggacggccagactgcgcagttcgacctgacgctggatattcaggaagacgaaaacggcatctgggcctccttcgactatgccaccgatctgttcgacgcctccaccgtggaacgcctggccggccattggcgcaacctgttgcgcggcatcgtcgccgcaccggatgcgccattgttcagcctcggcgcgctgacggtcgagctgcctggcgaagtgcgcgagcccgcgcctcaggtgctgcagctctgggaccggcaggtcgaaagccagcccgatgcgctggccgcccgctgcctggaccgcaccttgaacacgcgtgcgctggatcaggcggccaatcaactggcccatcacttgatcggacggggtgtctgcgaaagccagccggtcgcggtattgatggagcgctcgctggactggctgacggcggtgctggcgatcttcaaggccggcggcgtgtacatgccgctggacatcaaagccccggatgcacgcctgcaacagatgttgagcaatgcaaaggccaaagtgctgctgtgtgccgaaggtgatgtgcgtcagacgtcactggatgttgccggttgtgagggcctggcctggacacctgcgctgtggcaggacttgccggtcagtcgtcctgatatcacgctgtcagccgattcagcggcttacgttattcatacctccggctccaccggccagcccaaaggcgtagtggtcagccaaggcgcgctggccagttacgtgcatggcgtgcttgagcagttgcaactggcccccgaggcgagcatggcgctggtctcgaccatcgccgccgacctcggccataccgtgctgttcggcgcgctgtgttcagggcgtaccctgcatgtgctgaccgaatcactgggtttcgacccggatgccttcgcggcctatatggccgagcatcaggtcggcgtgctgaaaatcgtgccgggtcatctggctgcgctgctgcaagccgctcaacccgccgacgtgttgccgcagcacgcgctgatcgtcggcggcgaagcctgttcgcctgcactggtcgagcaggtgcgtcagctcaagccgggttgccgggtaatcaaccactatggcccgagcgagaccacggtcggggtactgacccatgaggtgcctgctttatccgagttgaatgcgatcccctgtgggagcgaacttgttcgcgaagaggccggcacaggcttgcaaaaggctgaggctctactaccgccttcgcgagcaagctcgctcccacaagaacccgccaaggtgccggtcggtaagccattgccgggggccagcgcttacgtgctggatgacgtgctgaaccccgtcgccacgcaggtcgcaggcgagctgtacattggcggcgacagcgtggcgcggggctacatcggccagcctgcactgactgccgagcgcttcgtgccagacccgttcgcccaggatggcagccgcgtttaccgcagtggcgaccgcatgcggcgaaatcatcagggcttgctggaattcatcggccgcgccgacgatcaggtcaaggtgcgcggctatcgtgtcgagcccgctgaagtggcgcgggtgctgctgagtctgccttctgtcgcgcaagtcagtgtgctggcgttgcctgtcgatgaagacgaatcgcgtctgcaactggtggcctattgcgtcgctgcaaccggtgccagcctgactattgacagcctgcgcgagcaactgacggcgcgcttgcccgactacatggtgcccgcgcagatcctgctgttggaccagctgccgctgaccgccaatggcaagctcgacaagcgcgcgctgccaaaaccgggcgcggccgc

SEQ ID NO: 67 - protein, 660 aa, Artificial Sequence
  Description of Artificial Sequence: Synthetic polypeptide
LVEALQPERNASHNPLFQVLFNHQSEIRSVTPEVQLEDLRLEGLAWDGQTAQFDLTLDIQEDENGIWASFDYATDLFDASTVERLAGHWRNLLRGIVAAPDAPLFSLGALTVELPGEVREPAPQVLQLWDRQVESQPDALAARCLDRTLNTRALDQAANQLAHHLIGRGVCESQPVAVLMERSLDWLTAVLAIFKAGGVYMPLDIKAPDARLQQMLSNAKAKVLLCAEGDVRQTSLDVAGCEGLAWTPALWQDLPVSRPDITLSADSAAYVIHTSGSTGQPKGVVVSQGALASYVHGVLEQLQLAPEASMALVSTIAADLGHTVLFGALCSGRTLHVLTESLGFDPDAFAAYMAEHQVGVLKIVPGHLAALLQAAQPADVLPQHALIVGGEACSPALVEQVRQLKPGCRVINHYGPSETTVGVLTHEVPALSELNAIPCGSELVREEAGTGLQKAEALLPPSRASSLPQEPAKVPVGKPLPGASAYVLDDVLNPVATQVAGELYIGGDSVARGYIGQPALTAERFVPDPFAQDGSRVYRSGDRMRRNHQGLLEFIGRADDQVKVRGYRVEPAEVARVLLSLPSVAQVSVLALPVDEDESRLQLVAYCVAATGASLTIDSLREQLTARLPDYMVPAQILLLDQLPLTANGKLDKRALPKPG

SEQ ID NO: 68 - DNA, 1902 bp, Artificial Sequence
  Description of Artificial Sequence: Synthetic polynucleotide
actagtggaagccttgcagccggagcgcaatgccagccacaacccactgttccaggtgctgttcaaccatcagagcgagatacgctcggtgacgcccgaggttcagttggaggacctgcgtctggaaggcctggcctgggacggccagactgcgcagttcgacctgacgctggatattcaggaagacgaaaacggcatctgggcctccttcgactatgccaccgatctgttcgacgcctccaccgtggaacgcctggccggccattggcgcaacctgttgcgcggcatcgtcgccaacccacgacagcggctcggcgagttgccgctgctggatgcgccggagcgccggcagaccctctccgaatggaacccggcccagcgcgagtgcgcggtgcagggcaccttgcagcagcgtttcgaggagcaggcgcggcaacggccacaggcggttgcgctgatcctcgacgaacaacggttgagctacggcgaactgaatgcgcgggccaatcgcctggcgcactgcctgatcgctcgcggcgttggcgcggacgtgccggtcgggctggcgctggagcgttcgctggacatgctggtcggcttgctggcgatcctcaaggccggcggcgcctacctgccgttggacccggcggcgccagaggagcgcctggcgcatatcctcgacgacagtggggtacggctgctgctgacccaggggcatctgctcgagcgcctgccgcggcaggcgggggtggaggtgctggccatcgacggactggtgctggacggctacgccgagagcgatccgctcccgacgctatcggcggacaacctggcctacgtgatctatacctcgggctcgaccggcaagcccaagggcacgttgctcacccaccgcaacgcgctgcgcctgttcagcgccaccgaggcctggttcggcttcggtgccagcgacacggtgctgcaaaagaccccgttcagctttgacgtgtcggtgtgggagttcttctggccgctgatgagcggtgcgcgcctggtggttgcagcgccgggggatcatcgcgacccggcccggttgatcagtgtgatcaccgccgagcaggtcactacagtgcacttcgtgccctcgatgttgcaggcgttcctccaggatgcggcggtgacccgttgccaaagcctgcagcgcattgtgtgcagcggcgaggcgctaccggtcgacgcccagcagcaagtctttgccaaactgccgcaagccggcctctacaacctgtatggcccaaccgaagccgccatcgacgtgacccactggacctgcgtcgacgaggggcacgacacggtgccgatcggcgaaccgattccggacctgtcctggtacatcctcgaccgtgacctgaacccggtgccgcgcggcgcggtgggcgagctgtacatcggtcgcgccggtctggcgcgcggctacctgaggcggcccgggttgagtgccacccgcttcgtgccgaacccgttccccggcggtgccggcgagcggctgtaccgtaccggcgacctggcacggttccaggcggatggcaatatcgagtacatcgggcgtatcgaccaccaggtgaaggttcgcggcttccgtatcgaactgggtgagatcgaagcggcgctcgccggtctggccggggtacgcgatgccgtggtgctggcccatgacggggtcggcggcacgcaactggtgggatacgtggtggcggactcggcggaggatgccgagcgtctgcgggagtcgctgcgggagtcgctgaagcggcacctgccggactacatggtgccggcgcacctgatgctgctggagcggatgccgctgacggtcaatggcaagctcgaccggcaggcgttgccgcaaccggatgcggccgc

SEQ ID NO: 69 - protein, 631 aa, Artificial Sequence
  Description of Artificial Sequence: Synthetic polypeptide
LVEALQPERNASHNPLFQVLFNHQSEIRSVTPEVQLEDLRLEGLAWDGQTAQFDLTLDIQEDENGIWASFDYATDLFDASTVERLAGHWRNLLRGIVANPRQRLGELPLLDAPERRQTLSEWNPAQRECAVQGTLQQRFEEQARQRPQAVALILDEQRLSYGELNARANRLAHCLIARGVGADVPVGLALERSLDMLVGLLAILKAGGAYLPLDPAAPEERLAHILDDSGVRLLLTQGHLLERLPRQAGVEVLAIDGLVLDGYAESDPLPTLSADNLAYVIYTSGSTGKPKGTLLTHRNALRLFSATEAWFGFGASDTVLQKTPFSFDVSVWEFFWPLMSGARLVVAAPGDHRDPARLISVITAEQVTTVHFVPSMLQAFLQDAAVTRCQSLQRIVCSGEALPVDAQQQVFAKLPQAGLYNLYGPTEAAIDVTHWTCVDEGHDTVPIGEPIPDLSWYILDRDLNPVPRGAVGELYIGRAGLARGYLRRPGLSATRFVPNPFPGGAGERLYRTGDLARFQADGNIEYIGRIDHQVKVRGFRIELGEIEAALAGLAGVRDAVVLAHDGVGGTQLVGYVVADSAEDAERLRESLRESLKRHLPDYMVPAHLMLLERMPLTVNGKLDRQALPQPD

SEQ ID NO: 70 - DNA, 1920 bp, Artificial Sequence
  Description of Artificial Sequence: Synthetic polynucleotide
actagtggaagccttgcagccggagcgcaatgccagccacaacccactgttccaggtgctgttcaaccatcagagcgagatacgctcggtgacgcccgaggttcagttggaggacctgcgtctggaaggcctggcctgggacggccagactgcgcagttcgacctgacgctggatattcaggaagacgaaaacggcatctgggcctccttcgactatgccaccgatctgttcgacgcctccaccgtggaacgcctggccggccattggcgcaacctgttgcgcggcatcgtcgccaacccacgacagcggctcggcgagttgccgctgctggatgcgccggagcgccggcagaccctctccgaatggaacccggcccagcgcgagtgcgcggtgcagggcaccttgcagcagcgtttcgaggagcaggcgcggcaacggccacaggcggttgcgctgatcctcgacgaacaacggttgagctacggcgaactgaatgcgcgggccaatcgcctggcgcactgcctgatcgctcgcggcgttggcgcggacgtgccggtcgggctggcgctggagcgttcgctggacatgctggtcggcttgctggcgatcctcaaggccggcggcgcctacctgccgttggacccggcggcgccagaggagcgcctggcgcatatcctcgacgacagtggggtacggctgctgctgacccaggggcatctgctcgagcgcctgccgcggcaggcgggggtggaggtgctggccatcgacggactggtgctggacggctacgccgagagcgatccgctcccgacgctatcggcggacaacctggcctacgtgatctatacctcgggctcgaccggcaagcccaagggcacgttgctcacccaccgcaacgcgctgcgcctgttcagcgccaccgaggcctggttcggcttcaccccggaggatcggatattgcagttcgccaccctgagcttcgacggcttcgtcgaacagctctatccggcgctgacccgtggtgcctgcgtggtcctgcgtggcggcgacctctgggataccggtgagctgtatcggcagatagtcgagcagggcgtgacccttgccgacctgcccacggcgtactggaacctgttcctgctcgatgccctggccgagccacggcgttcctacggtgccttgcggcagatccacatcggtggcgaagccatgccactggaggggccgaagctctggcggcaagccggcatgggccgggtgaggttgctcaatacctatggaccgaccgaggccacggtggtgtccagcgtcttcgattgttccgccgagaacgcccgggtgggcaatgccagtcctatcggccaggcgctaccggacctgtcctggtacatcctcgaccgtgacctgaacccggtgccgcgcggcgcggtgggcgagctgtacatcggtcgcgccggtctggcgcgcggctacctgaggcggcccgggttgagtgccacccgcttcgtgccgaacccgttccccggcggtgccggcgagcggctgtaccgtaccggcgacctggcacggttccaggcggatggcaatatcgagtacatcgggcgtatcgaccaccaggtgaaggttcgcggcttccgtatcgaactgggtgagatcgaagcggcgctcgccggtctggccggggtacgcgatgccgtggtgctggcccatgacggggtcggcggcacgcaactggtgggatacgtggtggcggactcggcggaggatgccgagcgtctgcgggagtcgctgcgggagtcgctgaagcggcacctgccggactacatggtgccggcgcacctgatgctgctggagcggatgccgctgacggtcaatggcaagctcgaccggcaggcgttgccgcaaccggatgcggccgc

SEQ ID NO: 71 - protein, 637 aa, Artificial Sequence
  Description of Artificial Sequence: Synthetic polypeptide
LVEALQPERNASHNPLFQVLFNHQSEIRSVTPEVQLEDLRLEGLAWDGQTAQFDLTLDIQEDENGIWASFDYATDLFDASTVERLAGHWRNLLRGIVANPRQRLGELPLLDAPERRQTLSEWNPAQRECAVQGTLQQRFEEQARQRPQAVALILDEQRLSYGELNARANRLAHCLIARGVGADVPVGLALERSLDMLVGLLAILKAGGAYLPLDPAAPEERLAHILDDSGVRLLLTQGHLLERLPRQAGVEVLAIDGLVLDGYAESDPLPTLSADNLAYVIYTSGSTGKPKGTLLTHRNALRLFSATEAWFGFTPEDRILQFATLSFDGFVEQLYPALTRGACVVLRGGDLWDTGELYRQIVEQGVTLADLPTAYWNLFLLDALAEPRRSYGALRQIHIGGEAMPLEGPKLWRQAGMGRVRLLNTYGPTEATVVSSVFDCSAENARVGNASPIGQALPDLSWYILDRDLNPVPRGAVGELYIGRAGLARGYLRRPGLSATRFVPNPFPGGAGERLYRTGDLARFQADGNIEYIGRIDHQVKVRGFRIELGEIEAALAGLAGVRDAVVLAHDGVGGTQLVGYVVADSAEDAERLRESLRESLKRHLPDYMVPAHLMLLERMPLTVNGKLDRQALPQPD

SEQ ID NO: 72 - DNA, 1911 bp, Artificial Sequence
  Description of Artificial Sequence: Synthetic polynucleotide
actagtggaagccttgcagccggagcgcaatgccagccacaacccactgttccaggtgctgttcaaccatcagagcgagatacgctcggtgacgcccgaggttcagttggaggacctgcgtctggaaggcctggcctgggacggccagactgcgcagttcgacctgacgctggatattcaggaagacgaaaacggcatctgggcctccttcgactatgccaccgatctgttcgacgcctccaccgtggaacgcctggccggccattggcgcaacctgttgcgcggcatcgtcgccaacccacgacagcggctcggcgagttgccgctgctggatgcgccggagcgccggcagaccctctccgaatggaacccggcccagcgcgagtgcgcggtgcagggcaccttgcagcagcgtttcgaggagcaggcgcggcaacggccacaggcggttgcgctgatcctcgacgaacaacggttgagctacggcgaactgaatgcgcgggccaatcgcctggcgcactgcctgatcgctcgcggcgttggcgcggacgtgccggtcgggctggcgctggagcgttcgctggacatgctggtcggcttgctggcgatcctcaaggccggcggcgcctacctgccgttggacccggcggcgccagaggagcgcctggcgcatatcctcgacgacagtggggtacggctgctgctgacccaggggcatctgctcgagcgcctgccgcggcaggcgggggtggaggtgctggccatcgacggactggtgctggacggctacgccgagagcgatccgctcccgacgctatcggcggacaacctggcctacgtgatctatacctcgggctcgaccggcaagcccaagggcacgttgctcacccactcggccctgaccaaccgcctgcaatggatgcaggaagcctatggcctcggtgccagcgacacggtgctgcaaaagaccccgttcagctttgacgtgtcggtgtgggagttcttctggccgctgatgagcggtgcgcgcctggtggttgcagcgccgggggatcatcgcgacccggcccggttgatcagtgtgatcaccgccgagcaggtcactacagtgcacttcgtgccctcgatgttgcaggcgttcctccaggatgcggcggtgacccgttgccaaagcctgcagcgcattgtgtgcagcggcgaggcgctaccggtcgacgcccagcagcaagtctttgccaaactgccgcaagccggcctctacaacctgtacggcatcaccgagaccacggtacacgtaacctaccgtccggtgagcgaagccgacctgaagggtggcctggtcagtccgatcggcgggaccatcccggacctgtcctggtacatcctcgaccgtgacctgaacccggtgccgcgcggcgcggtgggcgagctgtacatcggtcgcgccggtctggcgcgcggctacctgaggcggcccgggttgagtgccacccgcttcgtgccgaacccgttccccggcggtgccggcgagcggctgtaccgtaccggcgacctggcacggttccaggcggatggcaatatcgagtacatcgggcgtatcgaccaccaggtgaaggttcgcggcttccgtatcgaactgggtgagatcgaagcggcgctcgccggtctggccggggtacgcgatgccgtggtgctggcccatgacggggtcggcggcacgcaactggtgggatacgtggtggcggactcggcggaggatgccgagcgtctgcgggagtcgctgcgggagtcgctgaagcggcacctgccggactacatggtgccggcgcacctgatgctgctggagcggatgccgctgacggtcaatggcaagctcgaccggcaggcgttgccgcaaccggatgcggccgc

SEQ ID NO: 73 - protein, 634 aa, Artificial Sequence
  Description of Artificial Sequence: Synthetic polypeptide
LVEALQPERNASHNPLFQVLFNHQSEIRSVTPEVQLEDLRLEGLAWDGQTAQFDLTLDIQEDENGIWASFDYATDLFDASTVERLAGHWRNLLRGIVANPRQRLGELPLLDAPERRQTLSEWNPAQRECAVQGTLQQRFEEQARQRPQAVALILDEQRLSYGELNARANRLAHCLIARGVGADVPVGLALERSLDMLVGLLAILKAGGAYLPLDPAAPEERLAHILDDSGVRLLLTQGHLLERLPRQAGVEVLAIDGLVLDGYAESDPLPTLSADNLAYVIYTSGSTGKPKGTLLTHSALTNRLQWMQEAYGLGASDTVLQKTPFSFDVSVWEFFWPLMSGARLVVAAPGDHRDPARLISVITAEQVTTVHFVPSMLQAFLQDAAVTRCQSLQRIVCSGEALPVDAQQQVFAKLPQAGLYNLYGITETTVHVTYRPVSEADLKGGLVSPIGGTIPDLSWYILDRDLNPVPRGAVGELYIGRAGLARGYLRRPGLSATRFVPNPFPGGAGERLYRTGDLARFQADGNIEYIGRIDHQVKVRGFRIELGEIEAALAGLAGVRDAVVLAHDGVGGTQLVGYVVADSAEDAERLRESLRESLKRHLPDYMVPAHLMLLERMPLTVNGKLDRQALPQPD

SEQ ID NO: 74 - DNA, 1920 bp, Artificial Sequence
  Description of Artificial Sequence: Synthetic polynucleotide
actagtggaagccttgcagccggagcgcaatgccagccacaacccactgttccaggtgctgttcaaccatcagagcgagatacgctcggtgacgcccgaggttcagttggaggacctgcgtctggaaggcctggcctgggacggccagactgcgcagttcgacctgacgctggatattcaggaagacgaaaacggcatctgggcctccttcgactatgccaccgatctgttcgacgcctccaccgtggaacgcctggccggccattggcgcaacctgttgcgcggcatcgtcgccaacccacgacagcggctcggcgagttgccgctgctggatgcgccggagcgccggcagaccctctccgaatggaacccggcccagcgcgagtgcgcggtgcagggcaccttgcagcagcgtttcgaggagcaggcgcggcaacggccacaggcggttgcgctgatcctcgacgaacaacggttgagctacggcgaactgaatgcgcgggccaatcgcctggcgcactgcctgatcgctcgcggcgttggcgcggacgtgccggtcgggctggcgctggagcgttcgctggacatgctggtcggcttgctggcgatcctcaaggccggcggcgcctacctgccgttggacccggcggcgccagaggagcgcctggcgcatatcctcgacgacagtggggtacggctgctgctgacccaggggcatctgctcgagcgcctgccgcggcaggcgggggtggaggtgctggccatcgacggactggtgctggacggctacgccgagagcgatccgctcccgacgctatcggcggacaacctggcctacgtgatctatacctcgggctcgaccggcaagcccaagggcacgttgctcacccacgcggcgcttgcgcagttctcgcgtatcgccagtggttattccgcgctcaccccggaggatcggatattgcagttcgccaccctgagcttcgacggcttcgtcgaacagctctatccggcgctgacccgtggtgcctgcgtggtcctgcgtggcggcgacctctgggataccggtgagctgtatcggcagatagtcgagcagggcgtgacccttgccgacctgcccacggcgtactggaacctgttcctgctcgatgccctggccgagccacggcgttcctacggtgccttgcggcagatccacatcggtggcgaagccatgccactggaggggccgaagctctggcggcaagccggcatgggccgggtgaggttgctcaatacctacggcatcaccgagaccacggtacacgtaacctaccgtccggtgagcgaagccgacctgaagggtggcctggtcagtccgatcggcgggaccatcccggacctgtcctggtacatcctcgaccgtgacctgaacccggtgccgcgcggcgcggtgggcgagctgtacatcggtcgcgccggtctggcgcgcggctacctgaggcggcccgggttgagtgccacccgcttcgtgccgaacccgttccccggcggtgccggcgagcggctgtaccgtaccggcgacctggcacggttccaggcggatggcaatatcgagtacatcgggcgtatcgaccaccaggtgaaggttcgcggcttccgtatcgaactgggtgagatcgaagcggcgctcgccggtctggccggggtacgcgatgccgtggtgctggcccatgacggggtcggcggcacgcaactggtgggatacgtggtggcggactcggcggaggatgccgagcgtctgcgggagtcgctgcgggagtcgctgaagcggcacctgccggactacatggtgccggcgcacctgatgctgctggagcggatgccgctgacggtcaatggcaagctcgaccggcaggcgttgccgcaaccggatgcggccgc

SEQ ID NO: 75 - protein, 637 aa, Artificial Sequence
  Description of Artificial Sequence: Synthetic polypeptide
LVEALQPERNASHNPLFQVLFNHQSEIRSVTPEVQLEDLRLEGLAWDGQTAQFDLTLDIQEDENGIWASFDYATDLFDASTVERLAGHWRNLLRGIVANPRQRLGELPLLDAPERRQTLSEWNPAQRECAVQGTLQQRFEEQARQRPQAVALILDEQRLSYGELNARANRLAHCLIARGVGADVPVGLALERSLDMLVGLLAILKAGGAYLPLDPAAPEERLAHILDDSGVRLLLTQGHLLERLPRQAGVEVLAIDGLVLDGYAESDPLPTLSADNLAYVIYTSGSTGKPKGTLLTHAALAQFSRIASGYSALTPEDRILQFATLSFDGFVEQLYPALTRGACVVLRGGDLWDTGELYRQIVEQGVTLADLPTAYWNLFLLDALAEPRRSYGALRQIHIGGEAMPLEGPKLWRQAGMGRVRLLNTYGITETTVHVTYRPVSEADLKGGLVSPIGGTIPDLSWYILDRDLNPVPRGAVGELYIGRAGLARGYLRRPGLSATRFVPNPFPGGAGERLYRTGDLARFQADGNIEYIGRIDHQVKVRGFRIELGEIEAALAGLAGVRDAVVLAHDGVGGTQLVGYVVADSAEDAERLRESLRESLKRHLPDYMVPAHLMLLERMPLTVNGKLDRQALPQPD

SEQ ID NO: 76 - DNA, 1911 bp, Artificial Sequence
  Description of Artificial Sequence: Synthetic polynucleotide
actagtggaagccttgcagccggagcgcaatgccagccacaacccactgttccaggtgctgttcaaccatcagagcgagatacgctcggtgacgcccgaggttcagttggaggacctgcgtctggaaggcctggcctgggacggccagactgcgcagttcgacctgacgctggatattcaggaagacgaaaacggcatctgggcctccttcgactatgccaccgatctgttcgacgcctccaccgtggaacgcctggccggccattggcgcaacctgttgcgcggcatcgtcgccaacccacgacagcggctcggcgagttgccgctgctggatgcgccggagcgccggcagaccctctccgaatggaacccggcccagcgcgagtgcgcggtgcagggcaccttgcagcagcgtttcgaggagcaggcgcggcaacggccacaggcggttgcgctgatcctcgacgaacaacggttgagctacggcgaactgaatgcgcgggccaatcgcctggcgcactgcctgatcgctcgcggcgttggcgcggacgtgccggtcgggctggcgctggagcgttcgctggacatgctggtcggcttgctggcgatcctcaaggccggcggcgcctacctgccgttggacccggcggcgccagaggagcgcctggcgcatatcctcgacgacagtggggtacggctgctgctgacccaggggcatctgctcgagcgcctgccgcggcaggcgggggtggaggtgctggccatcgacggactggtgctggacggctacgccgagagcgatccgctcccgacgctatcggcggacaacctggcctacgtgatctatacctcgggctcgaccggcaagcccaagggcacgttgctcacccaccgcaacgcgctgcgcctgttcagcgccaccgaggcctggttcggcttcgacgagcgggacgtgtggacgttgttccattcctacgcctttgacgtgtcggtgtgggagttcttctggccgctgatgagcggtgcgcgcctggtggttgcagcgccgggggatcatcgcgacccggcccggttgatcagtgtgatcaccgccgagcaggtcactacagtgcacttcgtgccctcgatgttgcaggcgttcctccaggatgcggcggtgacccgttgccaaagcctgcagcgcattgtgtgcagcggcgaggcgctaccggtcgacgcccagcagcaagtctttgccaaactgccgcaagccggcctctacaacctgtatggcccaaccgaagccgccatcgacgtgacctaccgtccggtgagcgaagccgacctgaagggtggcctggtcagtccgatcggcgggaccatcccggacctgtcctggtacatcctcgaccgtgacctgaacccggtgccgcgcggcgcggtgggcgagctgtacatcggtcgcgccggtctggcgcgcggctacctgaggcggcccgggttgagtgccacccgcttcgtgccgaacccgttccccggcggtgccggcgagcggctgtaccgtaccggcgacctggcacggttccaggcggatggcaatatcgagtacatcgggcgtatcgaccaccaggtgaaggttcgcggcttccgtatcgaactgggtgagatcgaagcggcgctcgccggtctggccggggtacgcgatgccgtggtgctggcccatgacggggtcggcggcacgcaactggtgggatacgtggtggcggactcggcggaggatgccgagcgtctgcgggagtcgctgcgggagtcgctgaagcggcacctgccggactacatggtgccggcgcacctgatgctgctggagcggatgccgctgacggtcaatggcaagctcgaccggcaggcgttgccgcaaccggatgcggccgc

SEQ ID NO: 77 - protein, 634 aa, Artificial Sequence
  Description of Artificial Sequence: Synthetic polypeptide
LVEALQPERNASHNPLFQVLFNHQSEIRSVTPEVQLEDLRLEGLAWDGQTAQFDLTLDIQEDENGIWASFDYATDLFDASTVERLAGHWRNLLRGIVANPRQRLGELPLLDAPERRQTLSEWNPAQRECAVQGTLQQRFEEQARQRPQAVALILDEQRLSYGELNARANRLAHCLIARGVGADVPVGLALERSLDMLVGLLAILKAGGAYLPLDPAAPEERLAHILDDSGVRLLLTQGHLLERLPRQAGVEVLAIDGLVLDGYAESDPLPTLSADNLAYVIYTSGSTGKPKGTLLTHRNALRLFSATEAWFGFDERDVWTLFHSYAFDVSVWEFFWPLMSGARLVVAAPGDHRDPARLISVITAEQVTTVHFVPSMLQAFLQDAAVTRCQSLQRIVCSGEALPVDAQQQVFAKLPQAGLYNLYGPTEAAIDVTYRPVSEADLKGGLVSPIGGTIPDLSWYILDRDLNPVPRGAVGELYIGRAGLARGYLRRPGLSATRFVPNPFPGGAGERLYRTGDLARFQADGNIEYIGRIDHQVKVRGFRIELGEIEAALAGLAGVRDAVVLAHDGVGGTQLVGYVVADSAEDAERLRESLRESLKRHLPDYMVPAHLMLLERMPLTVNGKLDRQALPQPD

SEQ ID NO: 78 - DNA, 1920 bp, Artificial Sequence
  Description of Artificial Sequence: Synthetic polynucleotide
actagtggaagccttgcagccggagcgcaatgccagccacaacccactgttccaggtgctgttcaaccatcagagcgagatacgctcggtgacgcccgaggttcagttggaggacctgcgtctggaaggcctggcctgggacggccagactgcgcagttcgacctgacgctggatattcaggaagacgaaaacggcatctgggcctccttcgactatgccaccgatctgttcgacgcctccaccgtggaacgcctggccggccattggcgcaacctgttgcgcggcatcgtcgccaacccacgacagcggctcggcgagttgccgctgctggatgcgccggagcgccggcagaccctctccgaatggaacccggcccagcgcgagtgcgcggtgcagggcaccttgcagcagcgtttcgaggagcaggcgcggcaacggccacaggcggttgcgctgatcctcgacgaacaacggttgagctacggcgaactgaatgcgcgggccaatcgcctggcgcactgcctgatcgctcgcggcgttggcgcggacgtgccggtcgggctggcgctggagcgttcgctggacatgctggtcggcttgctggcgatcctcaaggccggcggcgcctacctgccgttggacccggcggcgccagaggagcgcctggcgcatatcctcgacgacagtggggtacggctgctgctgacccaggggcatctgctcgagcgcctgccgcggcaggcgggggtggaggtgctggccatcgacggactggtgctggacggctacgccgagagcgatccgctcccgacgctatcggcggacaacctggcctacgtgatctatacctcgggctcgaccggcaagcccaagggcacgttgctcacccaccgcaacgcgctgcgcctgttcagcgccaccgaggcctggttcggcttcgacgagcgggacgtgtggacgttgttccattcctacgccttcgacggcttcgtcgaacagctctatccggcgctgacccgtggtgcctgcgtggtcctgcgtggcggcgacctctgggataccggtgagctgtatcggcagatagtcgagcagggcgtgacccttgccgacctgcccacggcgtactggaacctgttcctgctcgatgccctggccgagccacggcgttcctacggtgccttgcggcagatccacatcggtggcgaagccatgccactggaggggccgaagctctggcggcaagccggcatgggccgggtgaggttgctcaatacctatggaccgaccgaggccacggtggtgtccacctaccgtccggtgagcgaagccgacctgaagggtggcctggtcagtccgatcggcgggaccatcccggacctgtcctggtacatcctcgaccgtgacctgaacccggtgccgcgcggcgcggtgggcgagctgtacatcggtcgcgccggtctggcgcgcggctacctgaggcggcccgggttgagtgccacccgcttcgtgccgaacccgttccccggcggtgccggcgagcggctgtaccgtaccggcgacctggcacggttccaggcggatggcaatatcgagtacatcgggcgtatcgaccaccaggtgaaggttcgcggcttccgtatcgaactgggtgagatcgaagcggcgctcgccggtctggccggggtacgcgatgccgtggtgctggcccatgacggggtcggcggcacgcaactggtgggatacgtggtggcggactcggcggaggatgccgagcgtctgcgggagtcgctgcgggagtcgctgaagcggcacctgccggactacatggtgccggcgcacctgatgctgctggagcggatgccgctgacggtcaatggcaagctcgaccggcaggcgttgccgcaaccggatgcggccgc

SEQ ID NO: 79 - protein, 637 aa, Artificial Sequence
  Description of Artificial Sequence: Synthetic polypeptide
LVEALQPERNASHNPLFQVLFNHQSEIRSVTPEVQLEDLRLEGLAWDGQTAQFDLTLDIQEDENGIWASFDYATDLFDASTVERLAGHWRNLLRGIVANPRQRLGELPLLDAPERRQTLSEWNPAQRECAVQGTLQQRFEEQARQRPQAVALILDEQRLSYGELNARANRLAHCLIARGVGADVPVGLALERSLDMLVGLLAILKAGGAYLPLDPAAPEERLAHILDDSGVRLLLTQGHLLERLPRQAGVEVLAIDGLVLDGYAESDPLPTLSADNLAYVIYTSGSTGKPKGTLLTHRNALRLFSATEAWFGFDERDVWTLFHSYAFDGFVEQLYPALTRGACVVLRGGDLWDTGELYRQIVEQGVTLADLPTAYWNLFLLDALAEPRRSYGALRQIHIGGEAMPLEGPKLWRQAGMGRVRLLNTYGPTEATVVSTYRPVSEADLKGGLVSPIGGTIPDLSWYILDRDLNPVPRGAVGELYIGRAGLARGYLRRPGLSATRFVPNPFPGGAGERLYRTGDLARFQADGNIEYIGRIDHQVKVRGFRIELGEIEAALAGLAGVRDAVVLAHDGVGGTQLVGYVVADSAEDAERLRESLRESLKRHLPDYMVPAHLMLLERMPLTVNGKLDRQALPQPD

SEQ ID NO: 80 - DNA, 1881 bp, Artificial Sequence
  Description of Artificial Sequence: Synthetic polynucleotide
actagtggaagccttgcagccggagcgcaatgccagccacaacccactgttccaggtgctgttcaaccatcagagcgagatacgctcggtgacgcccgaggttcagttggaggacctgcgtctggaaggcctggcctgggacggccagactgcgcagttcgacctgacgctggatattcaggaagacgaaaacggcatctgggcctccttcgactatgccaccgatctgttcgacgcctccaccgtggaacgcctggccggccattggcgcaacctgttgcgcggcatcgtcgccaacccacgacagcggctcggcgagttgccgctgctggatgcgccggagcgccggcagaccctctccgaatggaacccggcccagcgcgagtgcgcggtgcagggcaccttgcagcagcgtttcgaggagcaggcgcggcaacggccacaggcggttgcgctgatcctcgacgaacaacggttgagctacggcgaactgaatgcgcgggccaatcgcctggcgcactgcctgatcgctcgcggcgttggcgcggacgtgccggtcgggctggcgctggagcgttcgctggacatgctggtcggcttgctggcgatcctcaaggccggcggcgcctacctgccgttggacccggcggcgccagaggagcgcctggcgcatatcctcgacgacagtggggtacggctgctgctgacccaggggcatctgctcgagcgcctgccgcggcaggcgggggtggaggtgctggccatcgacggactggtgctggacggctacagcgatagcaacccaggtatcgtcctggacggcgaaaacctggcctatgtgatctacacctccggctccaccggccagcccaaaggcgcgggcaaccggcattcggccctgaccaaccgcctgcaatggatgcaggaagcctatggcctcggtgccagcgacacggtgctgcaaaagaccccgttcagctttgacgtgtcggtgtgggagttcttctggccgctgatgagcggtgcgcgcctggtggttgcagcgccgggggatcatcgcgacccggcccggttgatcagtgtgatcaccgccgagcaggtcactacagtgcacttcgtgccctcgatgttgcaggcgttcctccaggatgcggcggtgacccgttgccaaagcctgcagcgcattgtgtgcagcggcgaggcgctaccggtcgacgcccagcagcaagtctttgccaaactgccgcaagccggcctctacaacctgtatggcccaaccgaagccgccatcgacgtgacccactggacctgcgtcgacgaggggcacgacacggtgccgatcggcgaaccgattgccaacctgcgcacccatgtgctggatgccgacctgtcacccgtgccggtcggagttgccggtgagctgtacctgggcggcgcaggcttggcgcgtagttatcatcggcgtccgggcttgaccgccgagcgcttcgtgccttgcccgttccaccctggggcgcggctgtaccgcagcggcgaccgggtacgccagcgtgccgacggcgtcatcgaatacctgggccgcctcgatcaccaggtcaagctgcgcggcttgcgcatcgagctgggtgaaatcgaagcgcgcctgctggaacacccggctgtgcgtgaagcgagcgtgcaggtggttgatggcaagcaactggtggcttatgtggtgctgcaaccgaacggtgacgattggcgcgagcgcttgagcacccacctggccagccacctgccggactatatggtcccggcgcaatgggtagtgctggagcacatgccgctgagccccaacggcaaactggaccgcaaggcgctgcccaagcccgaggcggccgc

SEQ ID NO: 81 - protein, 624 aa, Artificial Sequence
  Description of Artificial Sequence: Synthetic polypeptide
LVEALQPERNASHNPLFQVLFNHQSEIRSVTPEVQLEDLRLEGLAWDGQTAQFDLTLDIQEDENGIWASFDYATDLFDASTVERLAGHWRNLLRGIVANPRQRLGELPLLDAPERRQTLSEWNPAQRECAVQGTLQQRFEEQARQRPQAVALILDEQRLSYGELNARANRLAHCLIARGVGADVPVGLALERSLDMLVGLLAILKAGGAYLPLDPAAPEERLAHILDDSGVRLLLTQGHLLERLPRQAGVEVLAIDGLVLDGYSDSNPGIVLDGENLAYVIYTSGSTGQPKGAGNRHSALTNRLQWMQEAYGLGASDTVLQKTPFSFDVSVWEFFWPLMSGARLVVAAPGDHRDPARLISVITAEQVTTVHFVPSMLQAFLQDAAVTRCQSLQRIVCSGEALPVDAQQQVFAKLPQAGLYNLYGPTEAAIDVTHWTCVDEGHDTVPIGEPIANLRTHVLDADLSPVPVGVAGELYLGGAGLARSYHRRPGLTAERFVPCPFHPGARLYRSGDRVRQRADGVIEYLGRLDHQVKLRGLRIELGEIEARLLEHPAVREASVQVVDGKQLVAYVVLQPNGDDWRERLSTHLASHLPDYMVPAQWVVLEHMPLSPNGKLDRKALPKPE

SEQ ID NO: 82 - DNA, 1920 bp, Artificial Sequence
  Description of Artificial Sequence: Synthetic polynucleotide
actagtggaagccttgcagccggagcgcaatgccagccacaacccactgttccaggtgctgttcaaccatcagagcgagatacgctcggtgacgcccgaggttcagttggaggacctgcgtctggaaggcctggcctgggacggccagactgcgcagttcgacctgacgctggatattcaggaagacgaaaacggcatctgggcctccttcgactatgccaccgatctgttcgacgcctccaccgtggaacgcctggccggccattggcgcaacctgttgcgcggcatcgtcgccaacccacgacagcggctcggcgagttgccgctgctggatgcgccggagcgccggcagaccctctccgaatggaacccggcccagcgcgagtgcgcggtgcagggcaccttgcagcagcgtttcgaggagcaggcgcggcaacggccacaggcggttgcgctgatcctcgacgaacaacggttgagctacggcgaactgaatgcgcgggccaatcgcctggcgcactgcctgatcgctcgcggcgttggcgcggacgtgccggtcgggctggcgctggagcgttcgctggacatgctggtcggcttgctggcgatcctcaaggccggcggcgcctacctgccgttggacccggcggcgccagaggagcgcctggcgcatatcctcgacgacagtggggtacggctgctgctgacccaggggcatctgctcgagcgcctgccgcggcaggcgggggtggaggtgctggccatcgacggactggtgctggacggctcggtgtctacggatgatccggtggtgaacctgcggccggagaacctggcctatgtgatctacacctccggctccaccggaaaacccaagggcgtggccatcagccatgcggcgcttgcgcagttctcgcgtatcgccagtggttattccgcgctcaccccggaggatcggatattgcagttcgccaccctgagcttcgacggcttcgtcgaacagctctatccggcgctgacccgtggtgcctgcgtggtcctgcgtggcggcgacctctgggataccggtgagctgtatcggcagatagtcgagcagggcgtgacccttgccgacctgcccacggcgtactggaacctgttcctgctcgatgccctggccgagccacggcgttcctacggtgccttgcggcagatccacatcggtggcgaagccatgccactggaggggccgaagctctggcggcaagccggcatgggccgggtgaggttgctcaatacctatggaccgaccgaggccacggtggtgtccagcgtcttcgattgttccgccgagaacgcccgggtgggcaatgccagtcctatcggccaggcgctacccggccgtacgttgctggtgctggatgaacatctcggcctactgcccgtagggccggtaggcgagctttatatcgccagccgtgccgggctggcccgtgcctaccacgatcggcccggcttgaccgccgagcgcttcttgcccgaccccttcggcgaaccgggctcaaggctctaccggaccggcgacctggcgcgccgacgcggtgacggcgtgatcgagtacatggggcgtgccgaccatcaggtgaagatccgcggcttccgcatcgagctgggggaggtcgaagcccgcctcctggacttggagggaatacgcgaagcggcggctcttgcgctggacggtcaactggtggcctacctggtggctgaggggggcgaggacgaaactcgccagccggctttgcgcgagcgtatccgcacagcgctacgggcctcgctaccggactacatggtgccctcgcacctgctgttcctggagcggatgccgctcagtccaaatggcaagctggaccgtcgggcgctgccgaagccggatgcggccgc

SEQ ID NO: 83 - protein, 637 aa, Artificial Sequence
  Description of Artificial Sequence: Synthetic polypeptide
LVEALQPERNASHNPLFQVLFNHQSEIRSVTPEVQLEDLRLEGLAWDGQTAQFDLTLDIQEDENGIWASFDYATDLFDASTVERLAGHWRNLLRGIVANPRQRLGELPLLDAPERRQTLSEWNPAQRECAVQGTLQQRFEEQARQRPQAVALILDEQRLSYGELNARANRLAHCLIARGVGADVPVGLALERSLDMLVGLLAILKAGGAYLPLDPAAPEERLAHILDDSGVRLLLTQGHLLERLPRQAGVEVLAIDGLVLDGSVSTDDPVVNLRPENLAYVIYTSGSTGKPKGVAISHAALAQFSRIASGYSALTPEDRILQFATLSFDGFVEQLYPALTRGACVVLRGGDLWDTGELYRQIVEQGVTLADLPTAYWNLFLLDALAEPRRSYGALRQIHIGGEAMPLEGPKLWRQAGMGRVRLLNTYGPTEATVVSSVFDCSAENARVGNASPIGQALPGRTLLVLDEHLGLLPVGPVGELYIASRAGLARAYHDRPGLTAERFLPDPFGEPGSRLYRTGDLARRRGDGVIEYMGRADHQVKIRGFRIELGEVEARLLDLEGIREAAALALDGQLVAYLVAEGGEDETRQPALRERIRTALRASLPDYMVPSHLLFLERMPLSPNGKLDRRALPKPD

SEQ ID NO: 84 - DNA, 1881 bp, Artificial Sequence
  Description of Artificial Sequence: Synthetic polynucleotide
actagtggaagccttgcagccggagcgcaatgccagccacaacccactgttccaggtgctgttcaaccatcagagcgagatacgctcggtgacgcccgaggttcagttggaggacctgcgtctggaaggcctggcctgggacggccagactgcgcagttcgacctgacgctggatattcaggaagacgaaaacggcatctgggcctccttcgactatgccaccgatctgttcgacgcctccaccgtggaacgcctggccggccattggcgcaacctgttgcgcggcatcgtcgccaacccacgacagcggctcggcgagttgccgctgctggatgcgccggagcgccggcagaccctctccgaatggaacccggcccagcgcgagtgcgcggtgcagggcaccttgcagcagcgtttcgaggagcaggcgcggcaacggccacaggcggttgcgctgatcctcgacgaacaacggttgagctacggcgaactgaatgcgcgggccaatcgcctggcgcactgcctgatcgctcgcggcgttggcgcggacgtgccggtcgggctggcgctggagcgttcgctggacatgctggtcggcttgctggcgatcctcaaggccggcggcgcctacctgccgttggacccggcggcgccagaggagcgcctggcgcatatcctcgacgacagtggggtacggctgctgctgacccaggggcatctgctcgagcgcctgccgcggcaggcgggggtggaggtgctggccatcgacggactggtgctggacggctacgccgagagcgatccgctcccgacgctatcggcggacaacctggcctatgtgatctacacctccggctccaccggccagcccaaaggcgcgggcaaccggcattcggccctgaccaaccgcctgcaatggatgcaggaagcctatggcctcggtgccagcgacacggtgctgcaaaagaccccgttcagctttgacgtgtcggtgtgggagttcttctggccgctgatgagcggtgcgcgcctggtggttgcagcgccgggggatcatcgcgacccggcccggttgatcagtgtgatcaccgccgagcaggtcactacagtgcacttcgtgccctcgatgttgcaggcgttcctccaggatgcggcggtgacccgttgccaaagcctgcagcgcattgtgtgcagcggcgaggcgctaccggtcgacgcccagcagcaagtctttgccaaactgccgcaagccggcctctacaacctgtatggcccaaccgaagccgccatcgacgtgacccactggacctgcgtcgacgaggggcacgacacggtgccgatcggcgaaccgattgccaacctgcgcacccatgtgctggatgccgacctgtcacccgtgccggtcggagttgccggtgagctgtacctgggcggcgcaggcttggcgcgtagttatcatcggcgtccgggcttgaccgccgagcgcttcgtgccttgcccgttccaccctggggcgcggctgtaccgcagcggcgaccgggtacgccagcgtgccgacggcgtcatcgaatacctgggccgcctcgatcaccaggtcaagctgcgcggcttgcgcatcgagctgggtgaaatcgaagcgcgcctgctggaacacccggctgtgcgtgaagcgagcgtgcaggtggttgatggcaagcaactggtggcttatgtggtgctgcaaccgaacggtgacgattggcgcgagcgcttgagcacccacctggccagccacctgccggactatatggtcccggcgcaatgggtagtgctggagcacatgccgctgagccccaacggcaaactggaccgcaaggcgctgcccaagcccgaggcggccgc

SEQ ID NO: 85 - protein, 624 aa, Artificial Sequence
  Description of Artificial Sequence: Synthetic polypeptide
LVEALQPERNASHNPLFQVLFNHQSEIRSVTPEVQLEDLRLEGLAWDGQTAQFDLTLDIQEDENGIWASFDYATDLFDASTVERLAGHWRNLLRGIVANPRQRLGELPLLDAPERRQTLSEWNPAQRECAVQGTLQQRFEEQARQRPQAVALILDEQRLSYGELNARANRLAHCLIARGVGADVPVGLALERSLDMLVGLLAILKAGGAYLPLDPAAPEERLAHILDDSGVRLLLTQGHLLERLPRQAGVEVLAIDGLVLDGYAESDPLPTLSADNLAYVIYTSGSTGQPKGAGNRHSALTNRLQWMQEAYGLGASDTVLQKTPFSFDVSVWEFFWPLMSGARLVVAAPGDHRDPARLISVITAEQVTTVHFVPSMLQAFLQDAAVTRCQSLQRIVCSGEALPVDAQQQVFAKLPQAGLYNLYGPTEAAIDVTHWTCVDEGHDTVPIGEPIANLRTHVLDADLSPVPVGVAGELYLGGAGLARSYHRRPGLTAERFVPCPFHPGARLYRSGDRVRQRADGVIEYLGRLDHQVKLRGLRIELGEIEARLLEHPAVREASVQVVDGKQLVAYVVLQPNGDDWRERLSTHLASHLPDYMVPAQWVVLEHMPLSPNGKLDRKALPKPE

SEQ ID NO: 86 - DNA, 1917 bp, Artificial Sequence
  Description of Artificial Sequence: Synthetic polynucleotide
actagtggaagccttgcagccggagcgcaatgccagccacaacccactgttccaggtgctgttcaaccatcagagcgagatacgctcggtgacgcccgaggttcagttggaggacctgcgtctggaaggcctggcctgggacggccagactgcgcagttcgacctgacgctggatattcaggaagacgaaaacggcatctgggcctccttcgactatgccaccgatctgttcgacgcctccaccgtggaacgcctggccggccattggcgcaacctgttgcgcggcatcgtcgccaacccacgacagcggctcggcgagttgccgctgctggatgcgccggagcgccggcagaccctctccgaatggaacccggcccagcgcgagtgcgcggtgcagggcaccttgcagcagcgtttcgaggagcaggcgcggcaacggccacaggcggttgcgctgatcctcgacgaacaacggttgagctacggcgaactgaatgcgcgggccaatcgcctggcgcactgcctgatcgctcgcggcgttggcgcggacgtgccggtcgggctggcgctggagcgttcgctggacatgctggtcggcttgctggcgatcctcaaggccggcggcgcctacctgccgttggacccggcggcgccagaggagcgcctggcgcatatcctcgacgacagtggggtacggctgctgctgacccaggggcatctgctcgagcgcctgccgcggcaggcgggggtggaggtgctggccatcgacggactggtgctggacggctacgccgagagcgatccgctcccgacgctatcggcggacaacctggcctatgtgatctacacctccggctccaccggaaaacccaagggcgtggccatcagccatgcggcgcttgcgcagttctcgcgtatcgccagtggttattccgcgctcaccccggaggatcggatattgcagttcgccaccctgagcttcgacggcttcgtcgaacagctctatccggcgctgacccgtggtgcctgcgtggtcctgcgtggcggcgacctctgggataccggtgagctgtatcggcagatagtcgagcagggcgtgacccttgccgacctgcccacggcgtactggaacctgttcctgctcgatgccctggccgagccacggcgttcctacggtgccttgcggcagatccacatcggtggcgaagccatgccactggaggggccgaagctctggcggcaagccggcatgggccgggtgaggttgctcaatacctatggaccgaccgaggccacggtggtgtccagcgtcttcgattgttccgccgagaacgcccgggtgggcaatgccagtcctatcggccaggcgctacccggccgtacgttgctggtgctggatgaacatctcggcctactgcccgtagggccggtaggcgagctttatatcgccagccgtgccgggctggcccgtgcctaccacgatcggcccggcttgaccgccgagcgcttcttgcccgaccccttcggcgaaccgggctcaaggctctaccggaccggcgacctggcgcgccgacgcggtgacggcgtgatcgagtacatggggcgtgccgaccatcaggtgaagatccgcggcttccgcatcgagctgggggaggtcgaagcccgcctcctggacttggagggaatacgcgaagcggcggctcttgcgctggacggtcaactggtggcctacctggtggctgaggggggcgaggacgaaactcgccagccggctttgcgcgagcgtatccgcacagcgctacgggcctcgctaccggactacatggtgccctcgcacctgctgttcctggagcggatgccgctcagtccaaatggcaagctggaccgtcgggcgctgccgaagccggatgcggccgc

SEQ ID NO: 87 - protein, 636 aa, Artificial Sequence
  Description of Artificial Sequence: Synthetic polypeptide
LVEALQPERNASHNPLFQVLFNHQSEIRSVTPEVQLEDLRLEGLAWDGQTAQFDLTLDIQEDENGIWASFDYATDLFDASTVERLAGHWRNLLRGIVANPRQRLGELPLLDAPERRQTLSEWNPAQRECAVQGTLQQRFEEQARQRPQAVALILDEQRLSYGELNARANRLAHCLIARGVGADVPVGLALERSLDMLVGLLAILKAGGAYLPLDPAAPEERLAHILDDSGVRLLLTQGHLLERLPRQAGVEVLAIDGLVLDGYAESDPLPTLSADNLAYVIYTSGSTGKPKGVAISHAALAQFSRIASGYSALTPEDRILQFATLSFDGFVEQLYPALTRGACVVLRGGDLWDTGELYRQIVEQGVTLADLPTAYWNLFLLDALAEPRRSYGALRQIHIGGEAMPLEGPKLWRQAGMGRVRLLNTYGPTEATVVSSVFDCSAENARVGNASPIGQALPGRTLLVLDEHLGLLPVGPVGELYIASRAGLARAYHDRPGLTAERFLPDPFGEPGSRLYRTGDLARRRGDGVIEYMGRADHQVKIRGFRIELGEVEARLLDLEGIREAAALALDGQLVAYLVAEGGEDETRQPALRERIRTALRASLPDYMVPSHLLFLERMPLSPNGKLDRRALPKPD

SEQ ID NO: 88 - DNA, 1881 bp, Artificial Sequence
  Description of Artificial Sequence: Synthetic polynucleotide
actagtggaagccttgcagccggagcgcaatgccagccacaacccactgttccaggtgctgttcaaccatcagagcgagatacgctcggtgacgcccgaggttcagttggaggacctgcgtctggaaggcctggcctgggacggccagactgcgcagttcgacctgacgctggatattcaggaagacgaaaacggcatctgggcctccttcgactatgccaccgatctgttcgacgcctccaccgtggaacgcctggccggccattggcgcaacctgttgcgcggcatcgtcgccaacccacgacagcggctcggcgagttgccgctgctggatgcgccggagcgccggcagaccctctccgaatggaacccggcccagcgcgagtgcgcggtgcagggcaccttgcagcagcgtttcgaggagcaggcgcggcaacggccacaggcggttgcgctgatcctcgacgaacaacggttgagctacggcgaactgaatgcgcgggccaatcgcctggcgcactgcctgatcgctcgcggcgttggcgcggacgtgccggtcgggctggcgctggagcgttcgctggacatgctggtcggcttgctggcgatcctcaaggccggcggcgcctacctgccgttggacccggcggcgccagaggagcgcctggcgcatatcctcgacgacagtggggtacggctgctgctgacccaggggcatctgctcgagcgcctgccgcggcaggcgggggtggaggtgctggccatcgacggactggtgctggacggctacgccgagagcgatccgctcccgacgctatcggcggacaacctggcctacgtgatctatacctcgggctcgaccggcaagcccaagggcacgttgctcacccaccgcaacgcgctgcgcctgttcagcgccaccgaggcctggttcggcttcgacgagcgggacgtgtggacgttgttccattcctacgcctttgacgtgtcggtgtgggagttcttctggccgctgatgagcggtgcgcgcctggtggttgcagcgccgggggatcatcgcgacccggcccggttgatcagtgtgatcaccgccgagcaggtcactacagtgcacttcgtgccctcgatgttgcaggcgttcctccaggatgcggcggtgacccgttgccaaagcctgcagcgcattgtgtgcagcggcgaggcgctaccggtcgacgcccagcagcaagtctttgccaaactgccgcaagccggcctctacaacctgtatggcccaaccgaagccgccatcgacgtgacccactggacctgcgtcgacgaggggcacgacacggtgccgatcggcgaaccgattgccaacctgcgcacccatgtgctggatgccgacctgtcacccgtgccggtcggagttgccggtgagctgtacctgggcggcgcaggcttggcgcgtagttatcatcggcgtccgggcttgaccgccgagcgcttcgtgccttgcccgttccaccctggggcgcggctgtaccgcagcggcgaccgggtacgccagcgtgccgacggcgtcatcgaatacctgggccgcctcgatcaccaggtcaagctgcgcggcttgcgcatcgagctgggtgaaatcgaagcgcgcctgctggaacacccggctgtgcgtgaagcgagcgtgcaggtggttgatggcaagcaactggtggcttatgtggtgctgcaaccgaacggtgacgattggcgcgagcgcttgagcacccacctggccagccacctgccggactatatggtcccggcgcaatgggtagtgctggagcacatgccgctgagccccaacggcaaactggaccgcaaggcgctgcccaagcccgaggcggccgc

SEQ ID NO: 89 - protein, 624 aa, Artificial Sequence
  Description of Artificial Sequence: Synthetic polypeptide
LVEALQPERNASHNPLFQVLFNHQSEIRSVTPEVQLEDLRLEGLAWDGQTAQFDLTLDIQEDENGIWASFDYATDLFDASTVERLAGHWRNLLRGIVANPRQRLGELPLLDAPERRQTLSEWNPAQRECAVQGTLQQRFEEQARQRPQAVALILDEQRLSYGELNARANRLAHCLIARGVGADVPVGLALERSLDMLVGLLAILKAGGAYLPLDPAAPEERLAHILDDSGVRLLLTQGHLLERLPRQAGVEVLAIDGLVLDGYAESDPLPTLSADNLAYVIYTSGSTGKPKGTLLTHRNALRLFSATEAWFGFDERDVWTLFHSYAFDVSVWEFFWPLMSGARLVVAAPGDHRDPARLISVITAEQVTTVHFVPSMLQAFLQDAAVTRCQSLQRIVCSGEALPVDAQQQVFAKLPQAGLYNLYGPTEAAIDVTHWTCVDEGHDTVPIGEPIANLRTHVLDADLSPVPVGVAGELYLGGAGLARSYHRRPGLTAERFVPCPFHPGARLYRSGDRVRQRADGVIEYLGRLDHQVKLRGLRIELGEIEARLLEHPAVREASVQVVDGKQLVAYVVLQPNGDDWRERLSTHLASHLPDYMVPAQWVVLEHMPLSPNGKLDRKALPKPE

SEQ ID NO: 90 - DNA, 1917 bp, Artificial Sequence
  Description of Artificial Sequence: Synthetic polynucleotide
actagtggaagccttgcagccggagcgcaatgccagccacaacccactgttccaggtgctgttcaaccatcagagcgagatacgctcggtgacgcccgaggttcagttggaggacctgcgtctggaaggcctggcctgggacggccagactgcgcagttcgacctgacgctggatattcaggaagacgaaaacggcatctgggcctccttcgactatgccaccgatctgttcgacgcctccaccgtggaacgcctggccggccattggcgcaacctgttgcgcggcatcgtcgccaacccacgacagcggctcggcgagttgccgctgctggatgcgccggagcgccggcagaccctctccgaatggaacccggcccagcgcgagtgcgcggtgcagggcaccttgcagcagcgtttcgaggagcaggcgcggcaacggccacaggcggttgcgctgatcctcgacgaacaacggttgagctacggcgaactgaatgcgcgggccaatcgcctggcgcactgcctgatcgctcgcggcgttggcgcggacgtgccggtcgggctggcgctggagcgttcgctggacatgctggtcggcttgctggcgatcctcaaggccggcggcgcctacctgccgttggacccggcggcgccagaggagcgcctggcgcatatcctcgacgacagtggggtacggctgctgctgacccaggggcatctgctcgagcgcctgccgcggcaggcgggggtggaggtgctggccatcgacggactggtgctggacggctacgccgagagcgatccgctcccgacgctatcggcggacaacctggcctacgtgatctatacctcgggctcgaccggcaagcccaagggcacgttgctcacccaccgcaacgcgctgcgcctgttcagcgccaccgaggcctggttcggcttcgacgagcgggacgtgtggacgttgttccattcctacgccttcgacggcttcgtcgaacagctctatccggcgctgacccgtggtgcctgcgtggtcctgcgtggcggcgacctctgggataccggtgagctgtatcggcagatagtcgagcagggcgtgacccttgccgacctgcccacggcgtactggaacctgttcctgctcgatgccctggccgagccacggcgttcctacggtgccttgcggcagatccacatcggtggcgaagccatgccactggaggggccgaagctctggcggcaagccggcatgggccgggtgaggttgctcaatacctatggaccgaccgaggccacggtggtgtccagcgtcttcgattgttccgccgagaacgcccgggtgggcaatgccagtcctatcggccaggcgctacccggccgtacgttgctggtgctggatgaacatctcggcctactgcccgtagggccggtaggcgagctttatatcgccagccgtgccgggctggcccgtgcctaccacgatcggcccggcttgaccgccgagcgcttcttgcccgaccccttcggcgaaccgggctcaaggctctaccggaccggcgacctggcgcgccgacgcggtgacggcgtgatcgagtacatggggcgtgccgaccatcaggtgaagatccgcggcttccgcatcgagctgggggaggtcgaagcccgcctcctggacttggagggaatacgcgaagcggcggctcttgcgctggacggtcaactggtggcctacctggtggctgaggggggcgaggacgaaactcgccagccggctttgcgcgagcgtatccgcacagcgctacgggcctcgctaccggactacatggtgccctcgcacctgctgttcctggagcggatgccgctcagtccaaatggcaagctggaccgtcgggcgctgccgaagccggatgcggccgc

SEQ ID NO: 91 - protein, 636 aa, Artificial Sequence
  Description of Artificial Sequence: Synthetic polypeptide
LVEALQPERNASHNPLFQVLFNHQSEIRSVTPEVQLEDLRLEGLAWDGQTAQFDLTLDIQEDENGIWASFDYATDLFDASTVERLAGHWRNLLRGIVANPRQRLGELPLLDAPERRQTLSEWNPAQRECAVQGTLQQRFEEQARQRPQAVALILDEQRLSYGELNARANRLAHCLIARGVGADVPVGLALERSLDMLVGLLAILKAGGAYLPLDPAAPEERLAHILDDSGVRLLLTQGHLLERLPRQAGVEVLAIDGLVLDGYAESDPLPTLSADNLAYVIYTSGSTGKPKGTLLTHRNALRLFSATEAWFGFDERDVWTLFHSYAFDGFVEQLYPALTRGACVVLRGGDLWDTGELYRQIVEQGVTLADLPTAYWNLFLLDALAEPRRSYGALRQIHIGGEAMPLEGPKLWRQAGMGRVRLLNTYGPTEATVVSSVFDCSAENARVGNASPIGQALPGRTLLVLDEHLGLLPVGPVGELYIASRAGLARAYHDRPGLTAERFLPDPFGEPGSRLYRTGDLARRRGDGVIEYMGRADHQVKIRGFRIELGEVEARLLDLEGIREAAALALDGQLVAYLVAEGGEDETRQPALRERIRTALRASLPDYMVPSHLLFLERMPLSPNGKLDRRALPKPD

SEQ ID NO: 92 - DNA, 1893 bp, Artificial Sequence
  Description of Artificial Sequence: Synthetic polynucleotide
actagtggaagccttgcagccggagcgcaatgccagccacaacccactgttccaggtgctgttcaaccatcagagcgagatacgctcggtgacgcccgaggttcagttggaggacctgcgtctggaaggcctggcctgggacggccagactgcgcagttcgacctgacgctggatattcaggaagacgaaaacggcatctgggcctccttcgactatgccaccgatctgttcgacgcctccaccgtggaacgcctggccggccactggctcgcgctgttgcaggccatttgcgccaatgcgggtcagcgtattgctgaggtgccaatgcttgacgctgccgaacagcagcagattgttcgcgactggaacgccacggctgccgatttccctggtgagcactgcctgcacagcctgatcgaagcccaggtacaggctacgccggacgctccggcactgatttttgcggctgaacaactgagctatgcgcaacttaacgcccgcgctaatcagcttgcccatcgcttgcgtgaggcgggtgttggcccggatgtgctggtggggatttgtgtcgagcgcagcgtggatatggtcattggtctgctggcgatcatcaaggccggtggcgcttacgtgccgctggacccggattaccctgaagatcgtttggcctacatgatgcaggacagcggcattggcttgctgttgacccagagtgcgctgctacagggcctgccggttcaggtgcagagcctttgtctggatcaggagggcgattggcttgacggttacagcaccgccaacccgatcaacctcagtcacccgcagaacctggcatacgtaatttacacctccggttcgaccggcaagcccaagggcgccggcaacagccatcgcgccctggtcaaccgtttgcactggatgcagaaggcttacgcactggatggcagcgatacggtattgcagaaaaccccgttcagtttcgatgtctcggtgtgggaattcttctggccgctgctgaccggagcacgtttggccgtggcgttgccgggcgatcatcgcgatccggagcggctggtgcagaccatccgcgaacatcaggtcacgacgctgcactttgtcccgtcgatgctccaggcgtttctgactcatccgcaggtagaaggctgtaacagcctgcgtcgtgtggtgtgcagcggcgaagcactgccttccgaactggccggtcaggtgctcaagcgtctgccgcagacgggtttgttcaacctgtacggcccgaccgaagcggctatcgacgtgacgcattggacctgcaccaaagacgacgtgctcagcgtgccgattggtcgacctatcgataacctgaaaacccatatcctcgacgacggattgctgcctgccgcgcagggcgtctcggcagagctgtacctgggcggtatcggtctggcgcggggttatcacaatcgcgcggcgctgacggctgaacgctttgtgccggatcctttcgacgagcagggcgggcgtctttaccggaccggggatctggcgcgttatcgcgatgaaggcgttatcgaatacgccgggcgtatcgaccatcaggtgaaaattcgcggcctgcgtatcgagctgggcgagatcgaagccagcctgctggagcacggcagcgttcaggaagcagtggtcatcgacgttgacggcccatccggcaagcagctggcagcctatctggtggctgagcacagtggcgataacctgcgtgatgcactcaaggtgtatctcaaggaaacactgcccgattacatggtgccgacccacttcgtctggctggcaagcatgcccctgagcgccaacggcaagctggatcgcaaagccctgccgacaccagacgcggccgc

SEQ ID NO: 93 - protein, 628 aa, Artificial Sequence
  Description of Artificial Sequence: Synthetic polypeptide
LVEALQPERNASHNPLFQVLFNHQSEIRSVTPEVQLEDLRLEGLAWDGQTAQFDLTLDIQEDENGIWASFDYATDLFDASTVERLAGHWLALLQAICANAGQRIAEVPMLDAAEQQQIVRDWNATAADFPGEHCLHSLIEAQVQATPDAPALIFAAEQLSYAQLNARANQLAHRLREAGVGPDVLVGICVERSVDMVIGLLAIIKAGGAYVPLDPDYPEDRLAYMMQDSGIGLLLTQSALLQGLPVQVQSLCLDQEGDWLDGYSTANPINLSHPQNLAYVIYTSGSTGKPKGAGNSHRALVNRLHWMQKAYALDGSDTVLQKTPFSFDVSVWEFFWPLLTGARLAVALPGDHRDPERLVQTIREHQVTTLHFVPSMLQAFLTHPQVEGCNSLRRVVCSGEALPSELAGQVLKRLPQTGLFNLYGPTEAAIDVTHWTCTKDDVLSVPIGRPIDNLKTHILDDGLLPAAQGVSAELYLGGIGLARGYHNRAALTAERFVPDPFDEQGGRLYRTGDLARYRDEGVIEYAGRIDHQVKIRGLRIELGEIEASLLEHGSVQEAVVIDVDGPSGKQLAAYLVAEHSGDNLRDALKVYLKETLPDYMVPTHFVWLASMPLSANGKLDRKALPTPD

SEQ ID NO: 94 - DNA, 1893 bp, Artificial Sequence
  Description of Artificial Sequence: Synthetic polynucleotide
actagtggaagccttgcagccggagcgcaatgccagccacaacccactgttccaggtgctgttcaaccatcagagcgagatacgctcggtgacgcccgaggttcagttggaggacctgcgtctggaaggcctggcctgggacggccagactgcgcagttcgacctgacgctggatattcaggaagacgaaaacggcatctgggcctccttcgactatgccaccgatctgttcgacgcctccaccgtggaacgcctggccggccattggcgcaacctgttgcgcggcatcgtcgccaacccacgacagcggctcggcgagttgccgctgctggatgctgccgaacagcagcagattgttcgcgactggaacgccacggctgccgatttccctggtgagcactgcctgcacagcctgatcgaagcccaggtacaggctacgccggacgctccggcactgatttttgcggctgaacaactgagctatgcgcaacttaacgcccgcgctaatcagcttgcccatcgcttgcgtgaggcgggtgttggcccggatgtgctggtggggatttgtgtcgagcgcagcgtggatatggtcattggtctgctggcgatcatcaaggccggtggcgcttacgtgccgctggacccggattaccctgaagatcgtttggcctacatgatgcaggacagcggcattggcttgctgttgacccagagtgcgctgctacagggcctgccggttcaggtgcagagcctttgtctggatcaggagggcgattggcttgacggttacagcaccgccaacccgatcaacctcagtcacccgcagaacctggcatacgtaatttacacctccggttcgaccggcaagcccaagggcgccggcaacagccatcgcgccctggtcaaccgtttgcactggatgcagaaggcttacgcactggatggcagcgatacggtattgcagaaaaccccgttcagtttcgatgtctcggtgtgggaattcttctggccgctgctgaccggagcacgtttggccgtggcgttgccgggcgatcatcgcgatccggagcggctggtgcagaccatccgcgaacatcaggtcacgacgctgcactttgtcccgtcgatgctccaggcgtttctgactcatccgcaggtagaaggctgtaacagcctgcgtcgtgtggtgtgcagcggcgaagcactgccttccgaactggccggtcaggtgctcaagcgtctgccgcagacgggtttgttcaacctgtacggcccgaccgaagcggctatcgacgtgacgcattggacctgcaccaaagacgacgtgctcagcgtgccgattggtcgacctatcgataacctgaaaacccatatcctcgacgacggattgctgcctgccgcgcagggcgtctcggcagagctgtacctgggcggtatcggtctggcgcggggttatcacaatcgcgcggcgctgacggctgaacgctttgtgccggatcctttcgacgagcagggcgggcgtctttaccggaccggggatctggcgcgttatcgcgatgaaggcgttatcgaatacgccgggcgtatcgaccatcaggtgaaaattcgcggcctgcgtatcgagctgggcgagatcgaagccagcctgctggagcacggcagcgttcaggaagcagtggtcatcgacgttgacggcccatccggcaagcagctggcagcctatctggtggctgagcacagtggcgataacctgcgtgatgcactcaaggtgtatctcaaggaaacactgcccgattacatggtgccgacccacttcgtctggctggcaagcatgcccctgagcgccaacggcaagctggatcgcaaagccctgccgacaccagacgcggccgc

SEQ ID NO: 95 - protein, 628 aa, Artificial Sequence
  Description of Artificial Sequence: Synthetic polypeptide
LVEALQPERNASHNPLFQVLFNHQSEIRSVTPEVQLEDLRLEGLAWDGQTAQFDLTLDIQEDENGIWASFDYATDLFDASTVERLAGHWRNLLRGIVANPRQRLGELPLLDAAEQQQIVRDWNATAADFPGEHCLHSLIEAQVQATPDAPALIFAAEQLSYAQLNARANQLAHRLREAGVGPDVLVGICVERSVDMVIGLLAIIKAGGAYVPLDPDYPEDRLAYMMQDSGIGLLLTQSALLQGLPVQVQSLCLDQEGDWLDGYSTANPINLSHPQNLAYVIYTSGSTGKPKGAGNSHRALVNRLHWMQKAYALDGSDTVLQKTPFSFDVSVWEFFWPLLTGARLAVALPGDHRDPERLVQTIREHQVTTLHFVPSMLQAFLTHPQVEGCNSLRRVVCSGEALPSELAGQVLKRLPQTGLFNLYGPTEAAIDVTHWTCTKDDVLSVPIGRPIDNLKTHILDDGLLPAAQGVSAELYLGGIGLARGYHNRAALTAERFVPDPFDEQGGRLYRTGDLARYRDEGVIEYAGRIDHQVKIRGLRIELGEIEASLLEHGSVQEAVVIDVDGPSGKQLAAYLVAEHSGDNLRDALKVYLKETLPDYMVPTHFVWLASMPLSANGKLDRKALPTPD

SEQ ID NO: 96 - DNA, 1893 bp, Artificial Sequence
  Description of Artificial Sequence: Synthetic polynucleotide
actagtggaagccttgcagccggagcgcaatgccagccacaacccactgttccaggtgctgttcaaccatcagagcgagatacgctcggtgacgcccgaggttcagttggaggacctgcgtctggaaggcctggcctgggacggccagactgcgcagttcgacctgacgctggatattcaggaagacgaaaacggcatctgggcctccttcgactatgccaccgatctgttcgacgcctccaccgtggaacgcctggccggccattggcgcaacctgttgcgcggcatcgtcgccaacccacgacagcggctcggcgagttgccgctgctggatgcgccggaacagcagcagattgttcgcgactggaacgccacggctgccgatttccctggtgagcactgcctgcacagcctgatcgaagcccaggtacaggctacgccggacgctccggcactgatttttgcggctgaacaactgagctatgcgcaacttaacgcccgcgctaatcagcttgcccatcgcttgcgtgaggcgggtgttggcccggatgtgctggtggggatttgtgtcgagcgcagcgtggatatggtcattggtctgctggcgatcatcaaggccggtggcgcttacgtgccgctggacccggattaccctgaagatcgtttggcctacatgatgcaggacagcggcattggcttgctgttgacccagagtgcgctgctacagggcctgccggttcaggtgcagagcctttgtctggatcaggagggcgattggcttgacggttacagcaccgccaacccgatcaacctcagtcacccgcagaacctggcatacgtaatttacacctccggttcgaccggcaagcccaagggcgccggcaacagccatcgcgccctggtcaaccgtttgcactggatgcagaaggcttacgcactggatggcagcgatacggtattgcagaaaaccccgttcagtttcgatgtctcggtgtgggaattcttctggccgctgctgaccggagcacgtttggccgtggcgttgccgggcgatcatcgcgatccggagcggctggtgcagaccatccgcgaacatcaggtcacgacgctgcactttgtcccgtcgatgctccaggcgtttctgactcatccgcaggtagaaggctgtaacagcctgcgtcgtgtggtgtgcagcggcgaagcactgccttccgaactggccggtcaggtgctcaagcgtctgccgcagacgggtttgttcaacctgtacggcccgaccgaagcggctatcgacgtgacgcattggacctgcaccaaagacgacgtgctcagcgtgccgattggtcgacctatcgataacctgaaaacccatatcctcgacgacggattgctgcctgccgcgcagggcgtctcggcagagctgtacctgggcggtatcggtctggcgcggggttatcacaatcgcgcggcgctgacggctgaacgctttgtgccggatcctttcgacgagcagggcgggcgtctttaccggaccggggatctggcgcgttatcgcgatgaaggcgttatcgaatacgccgggcgtatcgaccatcaggtgaaaattcgcggcctgcgtatcgagctgggcgagatcgaagccagcctgctggagcacggcagcgttcaggaagcagtggtcatcgacgttgacggcccatccggcaagcagctggcagcctatctggtggctgagcacagtggcgataacctgcgtgatgcactcaaggtgtatctcaaggaaacactgcccgattacatggtgccgacccacttcgtctggctggcaagcatgcccctgagcgccaacggcaagctggatcgcaaagccctgccgacaccagacgcggccgc

SEQ ID NO: 97 - protein, 628 aa, Artificial Sequence
  Description of Artificial Sequence: Synthetic polypeptide
LVEALQPERNASHNPLFQVLFNHQSEIRSVTPEVQLEDLRLEGLAWDGQTAQFDLTLDIQEDENGIWASFDYATDLFDASTVERLAGHWRNLLRGIVANPRQRLGELPLLDAPEQQQIVRDWNATAADFPGEHCLHSLIEAQVQATPDAPALIFAAEQLSYAQLNARANQLAHRLREAGVGPDVLVGICVERSVDMVIGLLAIIKAGGAYVPLDPDYPEDRLAYMMQDSGIGLLLTQSALLQGLPVQVQSLCLDQEGDWLDGYSTANPINLSHPQNLAYVIYTSGSTGKPKGAGNSHRALVNRLHWMQKAYALDGSDTVLQKTPFSFDVSVWEFFWPLLTGARLAVALPGDHRDPERLVQTIREHQVTTLHFVPSMLQAFLTHPQVEGCNSLRRVVCSGEALPSELAGQVLKRLPQTGLFNLYGPTEAAIDVTHWTCTKDDVLSVPIGRPIDNLKTHILDDGLLPAAQGVSAELYLGGIGLARGYHNRAALTAERFVPDPFDEQGGRLYRTGDLARYRDEGVIEYAGRIDHQVKIRGLRIELGEIEASLLEHGSVQEAVVIDVDGPSGKQLAAYLVAEHSGDNLRDALKVYLKETLPDYMVPTHFVWLASMPLSANGKLDRKALPTPD

SEQ ID NO: 98 - DNA, 1893 bp, Artificial Sequence
  Description of Artificial Sequence: Synthetic polynucleotide
actagtggaagccttgcagccggagcgcaatgccagccacaacccactgttccaggtgctgttcaaccatcagagcgagatacgctcggtgacgcccgaggttcagttggaggacctgcgtctggaaggcctggcctgggacggccagactgcgcagttcgacctgacgctggatattcaggaagacgaaaacggcatctgggcctccttcgactatgccaccgatctgttcgacgcctccaccgtggaacgcctggccggccattggcgcaacctgttgcgcggcatcgtcgccaacccacgacagcggctcggcgagttgccgctgctggatgcgccggagcgccggcagaccctctccgaatggaacgccacggctgccgatttccctggtgagcactgcctgcacagcctgatcgaagcccaggtacaggctacgccggacgctccggcactgatttttgcggctgaacaactgagctatgcgcaacttaacgcccgcgctaatcagcttgcccatcgcttgcgtgaggcgggtgttggcccggatgtgctggtggggatttgtgtcgagcgcagcgtggatatggtcattggtctgctggcgatcatcaaggccggtggcgcttacgtgccgctggacccggattaccctgaagatcgtttggcctacatgatgcaggacagcggcattggcttgctgttgacccagagtgcgctgctacagggcctgccggttcaggtgcagagcctttgtctggatcaggagggcgattggcttgacggttacagcaccgccaacccgatcaacctcagtcacccgcagaacctggcatacgtaatttacacctccggttcgaccggcaagcccaagggcgccggcaacagccatcgcgccctggtcaaccgtttgcactggatgcagaaggcttacgcactggatggcagcgatacggtattgcagaaaaccccgttcagtttcgatgtctcggtgtgggaattcttctggccgctgctgaccggagcacgtttggccgtggcgttgccgggcgatcatcgcgatccggagcggctggtgcagaccatccgcgaacatcaggtcacgacgctgcactttgtcccgtcgatgctccaggcgtttctgactcatccgcaggtagaaggctgtaacagcctgcgtcgtgtggtgtgcagcggcgaagcactgccttccgaactggccggtcaggtgctcaagcgtctgccgcagacgggtttgttcaacctgtacggcccgaccgaagcggctatcgacgtgacgcattggacctgcaccaaagacgacgtgctcagcgtgccgattggtcgacctatcgataacctgaaaacccatatcctcgacgacggattgctgcctgccgcgcagggcgtctcggcagagctgtacctgggcggtatcggtctggcgcggggttatcacaatcgcgcggcgctgacggctgaacgctttgtgccggatcctttcgacgagcagggcgggcgtctttaccggaccggggatctggcgcgttatcgcgatgaaggcgttatcgaatacgccgggcgtatcgaccatcaggtgaaaattcgcggcctgcgtatcgagctgggcgagatcgaagccagcctgctggagcacggcagcgttcaggaagcagtggtcatcgacgttgacggcccatccggcaagcagctggcagcctatctggtggctgagcacagtggcgataacctgcgtgatgcactcaaggtgtatctcaaggaaacactgcccgattacatggtgccgacccacttcgtctggctggcaagcatgcccctgagcgccaacggcaagctggatcgcaaagccctgccgacaccagacgcggccgc

SEQ ID NO: 99 - protein, 628 aa, Artificial Sequence
  Description of Artificial Sequence: Synthetic polypeptide
LVEALQPERNASHNPLFQVLFNHQSEIRSVTPEVQLEDLRLEGLAWDGQTAQFDLTLDIQEDENGIWASFDYATDLFDASTVERLAGHWRNLLRGIVANPRQRLGELPLLDAPERRQTLSEWNATAADFPGEHCLHSLIEAQVQATPDAPALIFAAEQLSYAQLNARANQLAHRLREAGVGPDVLVGICVERSVDMVIGLLAIIKAGGAYVPLDPDYPEDRLAYMMQDSGIGLLLTQSALLQGLPVQVQSLCLDQEGDWLDGYSTANPINLSHPQNLAYVIYTSGSTGKPKGAGNSHRALVNRLHWMQKAYALDGSDTVLQKTPFSFDVSVWEFFWPLLTGARLAVALPGDHRDPERLVQTIREHQVTTLHFVPSMLQAFLTHPQVEGCNSLRRVVCSGEALPSELAGQVLKRLPQTGLFNLYGPTEAAIDVTHWTCTKDDVLSVPIGRPIDNLKTHILDDGLLPAAQGVSAELYLGGIGLARGYHNRAALTAERFVPDPFDEQGGRLYRTGDLARYRDEGVIEYAGRIDHQVKIRGLRIELGEIEASLLEHGSVQEAVVIDVDGPSGKQLAAYLVAEHSGDNLRDALKVYLKETLPDYMVPTHFVWLASMPLSANGKLDRKALPTPD

SEQ ID NO: 100 - DNA, 1929 bp, Artificial Sequence
  Description of Artificial Sequence: Synthetic polynucleotide
actagtggaagccttgcagccggagcgcaatgccagccacaacccactgttccaggtgctgttcaaccatcagagcgagatacgctcggtgacgcccgaggttcagttggaggacctgcgtctggaaggcctggcctgggacggccagactgcgcagttcgacctgacgctggatattcaggaagacgaaaacggcatctgggcctccttcgactatgccaccgatctgttcgacgcctccaccgtggaacgcctggccggccactggcagaacctgttgcaaggcatggttgccgacccacggcagaatctcagccaattaaacctgctggacaacgccgaacggcaacagattcttcaactgtggaaccagagcgacgccggcttctcggccaagcgcctggtgcacgagttggtggccgaccgcgccggggaaacccccgaggcggtggcggtgaaatttggcgagcaacagctgacttacggcgagctggaccgccaggccaaccgcctggcccatgcattgatcgcccgtggcgtcggccccgaagtgcgcgtggcgattgccatgccacgcagcgccgagatcatggtggcgttcctggcagtgatgaaagccggtggcgtctacgtgccgctggacatcgaatacccgcgtgaccgcctgctgtacatgatgcaggacagccgcgcccgattgctgttgacccattcggcggtgcaacagcgcttgccgattccagacggcctggaagcccttgccgtggaccaggcgcaagcctggtccgctgacgacgacaccgcacccgaggtggcgctggacggcgacaacctggcctacgtgatctacacctccggctccaccggcatgcccaaaggcgtggcggtgtcccacggcccgttggtggcgcacatcattgccaccggcgagcgttatgaaacgtcgccggccgattgcgaactgcacttcatgtcgttcgccttcgacggctcccacgaaggctggatgcacccactgatcaacggcgcgagcgtgctgattcgcgatgacagcctgtggctgccggagtacacctaccagcagatgcatcgccatcacgtgaccatggccgtgtttccgccggtgtacctgcagcagctggccgaacatgccgaacgcgacggtaacccgccgaaggttcgtgtgtactgcttcggcggtgatgccgtggcccaggccagctatgacctggcgtggcgtgcactcaagccgacctacctgttcaacggctacggcccgaccgaaaccgtggtcacgccgttgctgtggaaagcccgccgtggtgacccgtgcggtgccgtctacgcgccgatcggcacactgctgggcaatcgcagcggctacgtattggacgcgcaactcaacctgcaacccatcggcgtagccggtgagttgtacctgggcggcgagggcgtggcccggggttacctggagcgtccggccctgaccgccgagcgcttcgtaccggacccgttcggcaagcccggcagccgcgtgtatcgcagcggcgacttgacccgtggccgtccggatggcgtggtggattacctcggccgtgtcgaccatcaggtgaaaatccgtggcttccgtattgagctgggcgagatcgaagcgcgcctgcgcgagcaggacagtgtcggcgaaaccgtggtggtggcccaggaagggccgagcggcaagcaactggtcgcctatgtggtgccgctggatccgttgctcgtcgacgacgccgtggcgcagtcgacctgccgcgaagccttgcgccgcgccctgaaaacccgcttgccggactatatggtgcccacgcacctgatgttccttgagcgcatgccgctgacgccgaacggcaagctcgaccgcaagggcctgccgcgcccggatgcggccgc

SEQ ID NO: 101 - protein, 640 aa, Artificial Sequence
  Description of Artificial Sequence: Synthetic polypeptide
LVEALQPERNASHNPLFQVLFNHQSEIRSVTPEVQLEDLRLEGLAWDGQTAQFDLTLDIQEDENGIWASFDYATDLFDASTVERLAGHWQNLLQGMVADPRQNLSQLNLLDNAERQQILQLWNQSDAGFSAKRLVHELVADRAGETPEAVAVKFGEQQLTYGELDRQANRLAHALIARGVGPEVRVAIAMPRSAEIMVAFLAVMKAGGVYVPLDIEYPRDRLLYMMQDSRARLLLTHSAVQQRLPIPDGLEALAVDQAQAWSADDDTAPEVALDGDNLAYVIYTSGSTGMPKGVAVSHGPLVAHIIATGERYETSPADCELHFMSFAFDGSHEGWMHPLINGASVLIRDDSLWLPEYTYQQMHRHHVTMAVFPPVYLQQLAEHAERDGNPPKVRVYCFGGDAVAQASYDLAWRALKPTYLFNGYGPTETVVTPLLWKARRGDPCGAVYAPIGTLLGNRSGYVLDAQLNLQPIGVAGELYLGGEGVARGYLERPALTAERFVPDPFGKPGSRVYRSGDLTRGRPDGVVDYLGRVDHQVKIRGFRIELGEIEARLREQDSVGETVVVAQEGPSGKQLVAYVVPLDPLLVDDAVAQSTCREALRRALKTRLPDYMVPTHLMFLERMPLTPNGKLDRKGLPRPD

SEQ ID NO: 102 - DNA, 1929 bp, Artificial Sequence
  Description of Artificial Sequence: Synthetic polynucleotide
actagtggaagccttgcagccggagcgcaatgccagccacaacccactgttccaggtgctgttcaaccatcagagcgagatacgctcggtgacgcccgaggttcagttggaggacctgcgtctggaaggcctggcctgggacggccagactgcgcagttcgacctgacgctggatattcaggaagacgaaaacggcatctgggcctccttcgactatgccaccgatctgttcgacgcctccaccgtggaacgcctggccggccattggcgcaacctgttgcgcggcatcgtcgccaacccacgacagcggctcggcgagttgccgctgctggataacgccgaacggcaacagattcttcaactgtggaaccagagcgacgccggcttctcggccaagcgcctggtgcacgagttggtggccgaccgcgccggggaaacccccgaggcggtggcggtgaaatttggcgagcaacagctgacttacggcgagctggaccgccaggccaaccgcctggcccatgcattgatcgcccgtggcgtcggccccgaagtgcgcgtggcgattgccatgccacgcagcgccgagatcatggtggcgttcctggcagtgatgaaagccggtggcgtctacgtgccgctggacatcgaatacccgcgtgaccgcctgctgtacatgatgcaggacagccgcgcccgattgctgttgacccattcggcggtgcaacagcgcttgccgattccagacggcctggaagcccttgccgtggaccaggcgcaagcctggtccgctgacgacgacaccgcacccgaggtggcgctggacggcgacaacctggcctacgtgatctacacctccggctccaccggcatgcccaaaggcgtggcggtgtcccacggcccgttggtggcgcacatcattgccaccggcgagcgttatgaaacgtcgccggccgattgcgaactgcacttcatgtcgttcgccttcgacggctcccacgaaggctggatgcacccactgatcaacggcgcgagcgtgctgattcgcgatgacagcctgtggctgccggagtacacctaccagcagatgcatcgccatcacgtgaccatggccgtgtttccgccggtgtacctgcagcagctggccgaacatgccgaacgcgacggtaacccgccgaaggttcgtgtgtactgcttcggcggtgatgccgtggcccaggccagctatgacctggcgtggcgtgcactcaagccgacctacctgttcaacggctacggcccgaccgaaaccgtggtcacgccgttgctgtggaaagcccgccgtggtgacccgtgcggtgccgtctacgcgccgatcggcacactgctgggcaatcgcagcggctacgtattggacgcgcaactcaacctgcaacccatcggcgtagccggtgagttgtacctgggcggcgagggcgtggcccggggttacctggagcgtccggccctgaccgccgagcgcttcgtaccggacccgttcggcaagcccggcagccgcgtgtatcgcagcggcgacttgacccgtggccgtccggatggcgtggtggattacctcggccgtgtcgaccatcaggtgaaaatccgtggcttccgtattgagctgggcgagatcgaagcgcgcctgcgcgagcaggacagtgtcggcgaaaccgtggtggtggcccaggaagggccgagcggcaagcaactggtcgcctatgtggtgccgctggatccgttgctcgtcgacgacgccgtggcgcagtcgacctgccgcgaagccttgcgccgcgccctgaaaacccgcttgccggactatatggtgcccacgcacctgatgttccttgagcgcatgccgctgacgccgaacggcaagctcgaccgcaagggcctgccgcgcccggatgcggccgc

SEQ ID NO: 103 - protein, 640 aa, Artificial Sequence
  Description of Artificial Sequence: Synthetic polypeptide
LVEALQPERNASHNPLFQVLFNHQSEIRSVTPEVQLEDLRLEGLAWDGQTAQFDLTLDIQEDENGIWASFDYATDLFDASTVERLAGHWRNLLRGIVANPRQRLGELPLLDNAERQQILQLWNQSDAGFSAKRLVHELVADRAGETPEAVAVKFGEQQLTYGELDRQANRLAHALIARGVGPEVRVAIAMPRSAEIMVAFLAVMKAGGVYVPLDIEYPRDRLLYMMQDSRARLLLTHSAVQQRLPIPDGLEALAVDQAQAWSADDDTAPEVALDGDNLAYVIYTSGSTGMPKGVAVSHGPLVAHIIATGERYETSPADCELHFMSFAFDGSHEGWMHPLINGASVLIRDDSLWLPEYTYQQMHRHHVTMAVFPPVYLQQLAEHAERDGNPPKVRVYCFGGDAVAQASYDLAWRALKPTYLFNGYGPTETVVTPLLWKARRGDPCGAVYAPIGTLLGNRSGYVLDAQLNLQPIGVAGELYLGGEGVARGYLERPALTAERFVPDPFGKPGSRVYRSGDLTRGRPDGVVDYLGRVDHQVKIRGFRIELGEIEARLREQDSVGETVVVAQEGPSGKQLVAYVVPLDPLLVDDAVAQSTCREALRRALKTRLPDYMVPTHLMFLERMPLTPNGKLDRKGLPRPD

SEQ ID NO: 104 - DNA, 1929 bp, Artificial Sequence
  Description of Artificial Sequence: Synthetic polynucleotide
actagtggaagccttgcagccggagcgcaatgccagccacaacccactgttccaggtgctgttcaaccatcagagcgagatacgctcggtgacgcccgaggttcagttggaggacctgcgtctggaaggcctggcctgggacggccagactgcgcagttcgacctgacgctggatattcaggaagacgaaaacggcatctgggcctccttcgactatgccaccgatctgttcgacgcctccaccgtggaacgcctggccggccattggcgcaacctgttgcgcggcatcgtcgccaacccacgacagcggctcggcgagttgccgctgctggatgcgccggaacggcaacagattcttcaactgtggaaccagagcgacgccggcttctcggccaagcgcctggtgcacgagttggtggccgaccgcgccggggaaacccccgaggcggtggcggtgaaatttggcgagcaacagctgacttacggcgagctggaccgccaggccaaccgcctggcccatgcattgatcgcccgtggcgtcggccccgaagtgcgcgtggcgattgccatgccacgcagcgccgagatcatggtggcgttcctggcagtgatgaaagccggtggcgtctacgtgccgctggacatcgaatacccgcgtgaccgcctgctgtacatgatgcaggacagccgcgcccgattgctgttgacccattcggcggtgcaacagcgcttgccgattccagacggcctggaagcccttgccgtggaccaggcgcaagcctggtccgctgacgacgacaccgcacccgaggtggcgctggacggcgacaacctggcctacgtgatctacacctccggctccaccggcatgcccaaaggcgtggcggtgtcccacggcccgttggtggcgcacatcattgccaccggcgagcgttatgaaacgtcgccggccgattgcgaactgcacttcatgtcgttcgccttcgacggctcccacgaaggctggatgcacccactgatcaacggcgcgagcgtgctgattcgcgatgacagcctgtggctgccggagtacacctaccagcagatgcatcgccatcacgtgaccatggccgtgtttccgccggtgtacctgcagcagctggccgaacatgccgaacgcgacggtaacccgccgaaggttcgtgtgtactgcttcggcggtgatgccgtggcccaggccagctatgacctggcgtggcgtgcactcaagccgacctacctgttcaacggctacggcccgaccgaaaccgtggtcacgccgttgctgtggaaagcccgccgtggtgacccgtgcggtgccgtctacgcgccgatcggcacactgctgggcaatcgcagcggctacgtattggacgcgcaactcaacctgcaacccatcggcgtagccggtgagttgtacctgggcggcgagggcgtggcccggggttacctggagcgtccggccctgaccgccgagcgcttcgtaccggacccgttcggcaagcccggcagccgcgtgtatcgcagcggcgacttgacccgtggccgtccggatggcgtggtggattacctcggccgtgtcgaccatcaggtgaaaatccgtggcttccgtattgagctgggcgagatcgaagcgcgcctgcgcgagcaggacagtgtcggcgaaaccgtggtggtggcccaggaagggccgagcggcaagcaactggtcgcctatgtggtgccgctggatccgttgctcgtcgacgacgccgtggcgcagtcgacctgccgcgaagccttgcgccgcgccctgaaaacccgcttgccggactatatggtgcccacgcacctgatgttccttgagcgcatgccgctgacgccgaacggcaagctcgaccgcaagggcctgccgcgcccggatgcggccgc

SEQ ID NO: 105 - protein, 640 aa, Artificial Sequence
  Description of Artificial Sequence: Synthetic polypeptide
LVEALQPERNASHNPLFQVLFNHQSEIRSVTPEVQLEDLRLEGLAWDGQTAQFDLTLDIQEDENGIWASFDYATDLFDASTVERLAGHWRNLLRGIVANPRQRLGELPLLDAPERQQILQLWNQSDAGFSAKRLVHELVADRAGETPEAVAVKFGEQQLTYGELDRQANRLAHALIARGVGPEVRVAIAMPRSAEIMVAFLAVMKAGGVYVPLDIEYPRDRLLYMMQDSRARLLLTHSAVQQRLPIPDGLEALAVDQAQAWSADDDTAPEVALDGDNLAYVIYTSGSTGMPKGVAVSHGPLVAHIIATGERYETSPADCELHFMSFAFDGSHEGWMHPLINGASVLIRDDSLWLPEYTYQQMHRHHVTMAVFPPVYLQQLAEHAERDGNPPKVRVYCFGGDAVAQASYDLAWRALKPTYLFNGYGPTETVVTPLLWKARRGDPCGAVYAPIGTLLGNRSGYVLDAQLNLQPIGVAGELYLGGEGVARGYLERPALTAERFVPDPFGKPGSRVYRSGDLTRGRPDGVVDYLGRVDHQVKIRGFRIELGEIEARLREQDSVGETVVVAQEGPSGKQLVAYVVPLDPLLVDDAVAQSTCREALRRALKTRLPDYMVPTHLMFLERMPLTPNGKLDRKGLPRPD

SEQ ID NO: 106 - DNA, 1929 bp, Artificial Sequence
  Description of Artificial Sequence: Synthetic polynucleotide
actagtggaagccttgcagccggagcgcaatgccagccacaacccactgttccaggtgctgttcaaccatcagagcgagatacgctcggtgacgcccgaggttcagttggaggacctgcgtctggaaggcctggcctgggacggccagactgcgcagttcgacctgacgctggatattcaggaagacgaaaacggcatctgggcctccttcgactatgccaccgatctgttcgacgcctccaccgtggaacgcctggccggccattggcgcaacctgttgcgcggcatcgtcgccaacccacgacagcggctcggcgagttgccgctgctggatgcgccggagcgccggcagaccctctccgaatggaaccagagcgacgccggcttctcggccaagcgcctggtgcacgagttggtggccgaccgcgccggggaaacccccgaggcggtggcggtgaaatttggcgagcaacagctgacttacggcgagctggaccgccaggccaaccgcctggcccatgcattgatcgcccgtggcgtcggccccgaagtgcgcgtggcgattgccatgccacgcagcgccgagatcatggtggcgttcctggcagtgatgaaagccggtggcgtctacgtgccgctggacatcgaatacccgcgtgaccgcctgctgtacatgatgcaggacagccgcgcccgattgctgttgacccattcggcggtgcaacagcgcttgccgattccagacggcctggaagcccttgccgtggaccaggcgcaagcctggtccgctgacgacgacaccgcacccgaggtggcgctggacggcgacaacctggcctacgtgatctacacctccggctccaccggcatgcccaaaggcgtggcggtgtcccacggcccgttggtggcgcacatcattgccaccggcgagcgttatgaaacgtcgccggccgattgcgaactgcacttcatgtcgttcgccttcgacggctcccacgaaggctggatgcacccactgatcaacggcgcgagcgtgctgattcgcgatgacagcctgtggctgccggagtacacctaccagcagatgcatcgccatcacgtgaccatggccgtgtttccgccggtgtacctgcagcagctggccgaacatgccgaacgcgacggtaacccgccgaaggttcgtgtgtactgcttcggcggtgatgccgtggcccaggccagctatgacctggcgtggcgtgcactcaagccgacctacctgttcaacggctacggcccgaccgaaaccgtggtcacgccgttgctgtggaaagcccgccgtggtgacccgtgcggtgccgtctacgcgccgatcggcacactgctgggcaatcgcagcggctacgtattggacgcgcaactcaacctgcaacccatcggcgtagccggtgagttgtacctgggcggcgagggcgtggcccggggttacctggagcgtccggccctgaccgccgagcgcttcgtaccggacccgttcggcaagcccggcagccgcgtgtatcgcagcggcgacttgacccgtggccgtccggatggcgtggtggattacctcggccgtgtcgaccatcaggtgaaaatccgtggcttccgtattgagctgggcgagatcgaagcgcgcctgcgcgagcaggacagtgtcggcgaaaccgtggtggtggcccaggaagggccgagcggcaagcaactggtcgcctatgtggtgccgctggatccgttgctcgtcgacgacgccgtggcgcagtcgacctgccgcgaagccttgcgccgcgccctgaaaacccgcttgccggactatatggtgcccacgcacctgatgttccttgagcgcatgccgctgacgccgaacggcaagctcgaccgcaagggcctgccgcgcccggatgcggccgc

SEQ ID NO: 107 - protein, 640 aa, Artificial Sequence
  Description of Artificial Sequence: Synthetic polypeptide
LVEALQPERNASHNPLFQVLFNHQSEIRSVTPEVQLEDLRLEGLAWDGQTAQFDLTLDIQEDENGIWASFDYATDLFDASTVERLAGHWRNLLRGIVANPRQRLGELPLLDAPERRQTLSEWNQSDAGFSAKRLVHELVADRAGETPEAVAVKFGEQQLTYGELDRQANRLAHALIARGVGPEVRVAIAMPRSAEIMVAFLAVMKAGGVYVPLDIEYPRDRLLYMMQDSRARLLLTHSAVQQRLPIPDGLEALAVDQAQAWSADDDTAPEVALDGDNLAYVIYTSGSTGMPKGVAVSHGPLVAHIIATGERYETSPADCELHFMSFAFDGSHEGWMHPLINGASVLIRDDSLWLPEYTYQQMHRHHVTMAVFPPVYLQQLAEHAERDGNPPKVRVYCFGGDAVAQASYDLAWRALKPTYLFNGYGPTETVVTPLLWKARRGDPCGAVYAPIGTLLGNRSGYVLDAQLNLQPIGVAGELYLGGEGVARGYLERPALTAERFVPDPFGKPGSRVYRSGDLTRGRPDGVVDYLGRVDHQVKIRGFRIELGEIEARLREQDSVGETVVVAQEGPSGKQLVAYVVPLDPLLVDDAVAQSTCREALRRALKTRLPDYMVPTHLMFLERMPLTPNGKLDRKGLPRPD

SEQ ID NO: 108 - DNA, 7458 bp, Artificial Sequence
  Description of Artificial Sequence: Synthetic polynucleotide
gcgtctttagcaaagaacaagtgcaggatatgtacgcacttacccctatgcaagaaggcatgctgtttcacgctttactggaccaggaacataacagtcaccttgtccagatgtctatctccctccagggggatctcgatgtgggtctgttcacagattcactgcatgtactggtagagcgctacgatgtctttcgtacgctgttcctatacgagaaactgaagcagcctctgcaggttgtactgaaacagcgtccgatcccaattgaattttacgatctgtccgcttgcgatgagtctgaaaaacagctgcgttacacccagtacaagcgtgccgaccaggagcgtaccttccacctggcgaaagacccgctgatgcgtgtagccctgttccagatgtcccagcacgactatcaggttatctggtcgttccatcacatcctgatggatggttggtgcttttctatcatttttgacgacctgcttgccatctacctgtctctccagaacaaaaccgcgctttcccttgaaccggtgcaaccgtattctcgtttcatcaactggctggaaaaacagaataaacaggcggcactgaactactggtctgattatctggaagcttatgagcagaaaaccactctgccaaaaaaagaagccgccttcgcaaaagcgtttcagccgacccagtaccgtttctcgctgaaccgtaccctgactaaacagctgggcactatcgcgagccagaaccaggtgaccctgtctactgttattcagaccatctggggtgtgctgctgcagaaatataacgcggcccatgatgttctgtttggttctgtcgtgtccggtcgtccaaccgatattgtaggcatcgataaaatggttggtctgttcattaacactatcccgttccgtgtccaggctaaagcgggccagactttttcagaactgctgcaggccgtacacaaacgtaccctgcagtcccagccgtatgaacacgtaccgctgtatgatattcagactcagtctgttttaaagcaggaactgattgatcacctgctggtaattgaaaactacccgctggtggaggcactgcagaaaaaagcgctgaaccagcagatcggcttcaccattactgccgtagaaatgtttgaaccgaccaactacgatctgaccgttatggttatgccgaaagaagaacttgcattccgttttgattataacgcagccctgttcgacgaacaggtggttcagaaactagtggggcacctccaacaggcggccgccctggcagaagaatggattggtccgcgtaatgaaatggaagaaactatcgcacagatctggtctgaagttctgggccgtaaacagattggcattcacgatgacttcttcgctctgggtggtcactctctcaaagctatgactgcagcttctcgtatcaaaaaagagctcggcatcgatctgccggtcaaactgctgttcgaggcaccgactatcgccggtatctcagcctatctgaaaaacggcggttcagatggtctgcaggacgttaccatcatgaaccaggatcaggaacaaatcatcttcgcatttccgccggtgctgggttacgggctgatgtatcagaacctgtcgtctcgtctgccgtcttacaaactgtgtgctttcgatttcattgaagaagaagaccgcctggaccgttacgcggacctgattcagaaactgcagccggagggcccattgaccctgttcggttacagcgcaggatgttctctggcattcgaagcggcgaaaaagctggaagaacagggtcgtatcgtacaacgtattattatggtagatagctataaaaaacagggggtatcggatctggacggccgtaccgtggaatccgacgtagaagcgctgatgaacgttaaccgcgataacgaagcacttaactccgaagctgtcaaacacggcctgaaacagaaaacccacgctttttacagctactatgttaacctgatcagcaccggccaggttaaagccgacatcgacctgctgacctctggtgctgacttcgatatgccggaatggctggctagctgggaagaggcaaccaccggtgtttatcgtgtaaaacgtggtttcggcacccacgctgaaatgctgcagggcgaaactctggaccgtaacgcggaaatcctgctggaattcctgaacacccagaccgttaccgtgtccctcgagcaccaccaccaccaccactgagatccggctgctaacaaagcccgaaaggaagctgagttggctgctgccaccgctgagcaataactagcataaccccttggggcctctaaacgggtcttgaggggttttttgctgaaaggaggaactatatccggattggcgaatgggacgcgccctgtagcggcgcattaagcgcggcgggtgtggtggttacgcgcagcgtgaccgctacacttgccagcgccctagcgcccgctcctttcgctttcttcccttcctttctcgccacgttcgccggctttccccgtcaagctctaaatcgggggctccctttagggttccgatttagtgctttacggcacctcgaccccaaaaaacttgattagggtgatggttcacgtagtgggccatcgccctgatagacggtttttcgccctttgacgttggagtccacgttctttaatagtggactcttgttccaaactggaacaacactcaaccctatctcggtctattcttttgatttataagggattttgccgatttcggcctattggttaaaaaatgagctgatttaacaaaaatttaacgcgaattttaacaaaatattaacgcttacaatttaggtggcacttttcggggaaatgtgcgcggaacccctatttgtttatttttctaaatacattcaaatatgtatccgctcatgaattaattcttagaaaaactcatcgagcatcaaatgaaactgcaatttattcatatcaggattatcaataccatatttttgaaaaagccgtttctgtaatgaaggagaaaactcaccgaggcagttccataggatggcaagatcctggtatcggtctgcgattccgactcgtccaacatcaatacaacctattaatttcccctcgtcaaaaataaggttatcaagtgagaaatcaccatgagtgacgactgaatccggtgagaatggcaaaagtttatgcatttctttccagacttgttcaacaggccagccattacgctcgtcatcaaaatcactcgcatcaaccaaaccgttattcattcgtgattgcgcctgagcgagacgaaatacgcgatcgctgttaaaaggacaattacaaacaggaatcgaatgcaaccggcgcaggaacactgccagcgcatcaacaatattttcacctgaatcaggatattcttctaatacctggaatgctgttttcccggggatcgcagtggtgagtaaccatgcatcatcaggagtacggataaaatgcttgatggtcggaagaggcataaattccgtcagccagtttagtctgaccatctcatctgtaacatcattggcaacgctacctttgccatgtttcagaaacaactctggcgcatcgggcttcccatacaatcgatagattgtcgcacctgattgcccgacattatcgcgagcccatttatacccatataaatcagcatccatgttggaatttaatcgcggcctagagcaagacgtttcccgttgaatatggctcataacaccccttgtattactgtttatgtaagcagacagttttattgttcatgaccaaaatcccttaacgtgagttttcgttccactgagcgtcagaccccgtagaaaagatcaaaggatcttcttgagatcctttttttctgcgcgtaatctgctgcttgcaaacaaaaaaaccaccgctaccagcggtggtttgtttgccggatcaagagctaccaactctttttccgaaggtaactggcttcagcagagcgcagataccaaatactgtccttctagtgtagccgtagttaggccaccacttcaagaactctgtagcaccgcctacatacctcgctctgctaatcctgttaccagtggctgctgccagtggcgataagtcgtgtcttaccgggttggactcaagacgatagttaccggataaggcgcagcggtcgggctgaacggggggttcgtgcacacagcccagcttggagcgaacgacctacaccgaactgagatacctacagcgtgagctatgagaaagcgccacgcttcccgaagggagaaaggcggacaggtatccggtaagcggcagggtcggaacaggagagcgcacgagggagcttccagggggaaacgcctggtatctttatagtcctgtcgggtttcgccacctctgacttgagcgtcgatttttgtgatgctcgtcaggggggcggagcctatggaaaaacgccagcaacgcggcctttttacggttcctggccttttgctggccttttgctcacatgttctttcctgcgttatcccctgattctgtggataaccgtattaccgcctttgagtgagctgataccgctcgccgcagccgaacgaccgagcgcagcgagtcagtgagcgaggaagcggaagagcgcctgatgcggtattttctccttacgcatctgtgcggtatttcacaccgcaatggtgcactctcagtacaatctgctctgatgccgcatagttaagccagtatacactccgctatcgctacgtgactgggtcatggctgcgccccgacacccgccaacacccgctgacgcgccctgacgggcttgtctgctcccggcatccgcttacagacaagctgtgaccgtctccgggagctgcatgtgtcagaggttttcaccgtcatcaccgaaacgcgcgaggcagctgcggtaaagctcatcagcgtggtcgtgaagcgattcacagatgtctgcctgttcatccgcgtccagctcgttgagtttctccagaagcgttaatgtctggcttctgataaagcgggccatgttaagggcggttttttcctgtttggtcactgatgcctccgtgtaagggggatttctgttcatgggggtaatgataccgatgaaacgagagaggatgctcacgatacgggttactgatgatgaacatgcccggttactggaacgttgtgagggtaaacaactggcggtatggatgcggcgggaccagagaaaaatcactcagggtcaatgccagcgcttcgttaatacagatgtaggtgttccacagggtagccagcagcatcctgcgatgcagatccggaacataatggtgcagggcgctgacttccgcgtttccagactttacgaaacacggaaaccgaagaccattcatgttgttgctcaggtcgcagacgttttgcagcagcagtcgcttcacgttcgctcgcgtatcggtgattcattctgctaaccagtaaggcaaccccgccagcctagccgggtcctcaacgacaggagcacgatcatgcgcacccgtggggccgccatgccggcgataatggcctgcttctcgccgaaacgtttggtggcgggaccagtgacgaaggcttgagcgagggcgtgcaagattccgaataccgcaagcgacaggccgatcatcgtcgcgctccagcgaaagcggtcctcgccgaaaatgacccagagcgctgccggcacctgtcctacgagttgcatgataaagaagacagtcataagtgcggcgacgatagtcatgccccgcgcccaccggaaggagctgactgggttgaaggctctcaagggcatcggtcgagatcccggtgcctaatgagtgagctaacttacattaattgcgttgcgctcactgcccgctttccagtcgggaaacctgtcgtgccagctgcattaatgaatcggccaacgcgcggggagaggcggtttgcgtattgggcgccagggtggtttttcttttcaccagtgagacgggcaacagctgattgcccttcaccgcctggccctgagagagttgcagcaagcggtccacgctggtttgccccagcaggcgaaaatcctgtttgatggtggttaacggcgggatataacatgagctgtcttcggtatcgtcgtatcccactaccgagatatccgcaccaacgcgcagcccggactcggtaatggcgcgcattgcgcccagcgccatctgatcgttggcaaccagcatcgcagtgggaacgatgccctcattcagcatttgcatggtttgttgaaaaccggacatggcactccagtcgccttcccgttccgctatcggctgaatttgattgcgagtgagatatttatgccagccagccagacgcagacgcgccgagacagaacttaatgggcccgctaacagcgcgatttgctggtgacccaatgcgaccagatgctccacgcccagtcgcgtaccgtcttcatgggagaaaataatactgttgatgggtgtctggtcagagacatcaagaaataacgccggaacattagtgcaggcagcttccacagcaatggcatcctggtcatccagcggatagttaatgatcagcccactgacgcgttgcgcgagaagattgtgcaccgccgctttacaggcttcgacgccgcttcgttctaccatcgacaccaccacgctggcacccagttgatcggcgcgagatttaatcgccgcgacaatttgcgacggcgcgtgcagggccagactggaggtggcaacgccaatcagcaacgactgtttgcccgccagttgttgtgccacgcggttgggaatgtaattcagctccgccatcgccgcttccactttttcccgcgttttcgcagaaacgtggctggcctggttcaccacgcgggaaacggtctgataagagacaccggcatactctgcgacatcgtataacgttactggtttcacattcaccaccctgaattgactctcttccgggcgctatcatgccataccgcgaaaggttttgcgccattcgatggtgtccgggatctcgacgctctcccttatgcgactcctgcattaggaagcagcccagtagtaggttgaggccgttgagcaccgccgccgcaaggaatggtgcatgcaaggagatggcgcccaacagtcccccggccacggggcctgccaccatacccacgccgaaacaagcgctcatgagcccgaagtggcgagcccgatcttccccatcggtgatgtcggcgatataggcgccagcaaccgcacctgtggcgccggtgatgccggccacgatgcgtccggcgtagaggatcgagatctcgatcccgcgaaattaatacgactcactataggggaattgtgagcggataacaattcccctctagaaataattttgtttaactttaagaaggagatataccatgg

SEQ ID NO: 109 - DNA, 1635 bp, Artificial Sequence
  Description of Artificial Sequence: Synthetic polynucleotide
gctagcgggccacctgcagcagatcgcagactgcgttgcgaacaactccggtgtggaactgtgtcaaattccgctgctgaccgaagcggaaaccagccagctgcttgcaaaacgcaccgagaccgcggccgactacccggcggctaccatgcacgagctgttttcccgccaggctgaaaaaaccccggaacaggttgcagtggttttcgcagatcagcacctgacctaccgtgaactggacgaaaaatccaatcagctggcgcgttttctgcgcaaaaaaggtatcgggaccggttccttggttggcacgctgctggatcgttctctggacatgatcgttggcatcctgggcgttctgaaagctggtggtgcgttcgtgccgattgatccagaactgccggctgagcgtatcgcgtacatgctgactcacagtcgcgtgccgctggttgtgacccagaaccacctgcgtgcaaaagttaccaccccgacggaaaccatcgacattaacactgccgttattggagaagaaagccgcgcgccaatcgaaagcctgaaccagccgcacgatttgttctacatcatctatactagcggcactaccgggcagcctaaaggcgttatgctggagcaccgcaacatggcaaacctgatgcactttactttcgatcaaactaatattgccttccatgaaaaagttctgcagtataccacctgctccttcgatgtttgttaccaggaaattttctcgaccctgctgtccggcggccagctctacctgatcaccaacgaactgcgtcgccacgtggaaaagctgttcgctttcattcaggaaaaacagatctcaattctgagcctgccggtctctttcctgaaattcatctttaacgaacaagactacgcccagtcctttccgcgttgtgtgaaacacattattactgctggtgaacagctggtagttacccacgagctgcagaaatacctgcgtcagcatcgtgtattcctgcacaaccattatggtccgtccgaaacgcacgtagttaccacttgcactatggatccaggtcaggctatcccggaactgccgccgatcggtaaaccgatctcaaacactggtatttacattctggacgaaggcctgcaactgaaaccggaaggtattgttggtgaactgtacatttccggcgccaatgttggtcgcggttatctgcaccaaccagaactgaccgcggaaaaattcctggacaacccgtatcagccgggcgagcgtatgtaccgcacgggtgatttggctctgtggctcccggatggtcagctggaattcctaggtcgtatcgatcaccaggttaaaattcgcggccaccgtattgaactgggtgaaatcgaaagccgcctgctgaaccatccggctatcaaagaagctgtggtcatcgatcgtgcggacgaaaccggcggcaaattcttgtgcgcttacgtcgtgctgcagaaagcactgagtgacgaggaaatgcgtgcgtacctggcccaagcgctgcctgaatacatgattccgtctttctttgttaccctggaacgtatcccggtaaccccgaacggtaagaccgaccgccgtgccctcccgaaaccggaagcggccgc

SEQ ID NO: 110 - protein, 542 aa, Artificial Sequence
  Description of Artificial Sequence: Synthetic polypeptide
LAGHLQQIADCVANNSGVELCQIPLLTEAETSQLLAKRTETAADYPAATMHELFSRQAEKTPEQVAVVFADQHLTYRELDEKSNQLARFLRKKGIGTGSLVGTLLDRSLDMIVGILGVLKAGGAFVPIDPELPAERIAYMLTHSRVPLVVTQNHLRAKVTTPTETIDINTAVIGEESRAPIESLNQPHDLFYIIYTSGTTGQPKGVMLEHRNMANLMHFTFDQTNIAFHEKVLQYTTCSFDVCYQEIFSTLLSGGQLYLITNELRRHVEKLFAFIQEKQISILSLPVSFLKFIFNEQDYAQSFPRCVKHIITAGEQLVVTHELQKYLRQHRVFLHNHYGPSETHVVTTCTMDPGQAIPELPPIGKPISNTGIYILDEGLQLKPEGIVGELYISGANVGRGYLHQPELTAEKFLDNPYQPGERMYRTGDLALWLPDGQLEFLGRIDHQVKIRGHRIELGEIESRLLNHPAIKEAVVIDRADETGGKFLCAYVVLQKALSDEEMRAYLAQALPEYMIPSFFVTLERIPVTPNGKTDRRALPKPE

SEQ ID NO: 111 - DNA, 1641 bp, Artificial Sequence
  Description of Artificial Sequence: Synthetic polynucleotide
gctagcgggccacctgcagcagatcgcagactgcgttgcgaacaacccgcatatccgtctgggcgaaatcgacatgctgctgccggaagaaaaacagcaaatcctggccggcttcaacgacaccgctgtctcttacgcgctggacaaaacactgcaccagctgttcgaagagcaggttgacaaaaccccggaccaggcggctctgctgttctccgaacaaagcctgacctactctgaactgaacgagcgcgcaaaccgtctggctcgcgtgctgcgtgccaaaggtgtaggtccagaccgcctcgttgctattatggcagagcgttccccggagatggttatcggtatcctcggcatcctgaaagcaggtggcgcgtacgttccggtggacccgggctacccgcaagaacgtatccagtacctgctggaagactcgaacgctgcgctgctgctgtctcaggctcacctgctgccactgctggcgcaggttagtagcgaactgcctgaatgcctggacctgaatgctgaactggatgctggtctgagcggttctaacctgccggcagttaaccaaccgaccgatctggcgtacgttatctatacgtcaggcaccaccggcaagcctaaaggcgttatgatcccgcaccagggcatcgtcaactgcctgcagtggcgccgtgatgaatacggcttcggcccgtctgataaagctttgcaggttttctccttcgcgtttgacggtttcgtggcgtctctgttcgcaccgcttttaggcggtgcgacctgcgtcctccctcaggaagctgcggcaaaagacccggttgcccttaaaaagcttatggcggctaccgaagtgacgcattactacggcgtaccgtcattattccaggcaatcctggattgtagcacgactactgatttcaatcaactgcgttgcgtaaccttgggcggtgaaaaattgccggttcagctggttcagaaaaccaaagaaaaacatccggcgattgaaattaacaatgaatatggtccgaccgaaaactccgtggtaaccaccatcagccgttctatcgaagcaggccaggcaatcacaatcggccgtccgctggcgaacgttcaggtgtacatcgttgacgagcagcaccacctgcaaccgatcggtgttgtgggcgagctgtgtatcggcggcgcgggcctggcgcgtggttacctgaacaaaccagagctgactgcggagaagttcgttgccaacccgttccgtccaggcgaacgtatgtacaaaactggtgacctggttaagtggcgtaccgatggcaccatcgaatatatcggccgcgcggacgaacaggtaaaagtccgtggttatcgtatcgaaatcggtgaaatcgaatctgccgttctggcataccaaggtatcgatcaagcggttgtggtggctcgtgatgatgatgcaaccgcaggttcgtacctgtgtgcttacttcgttgctgcaaccgcggttagcgtttccggtctgcgttctcatctggccaaagaactgccggcttatatgattccgagctactttgtggaactggatcagctgcctctgtccgcgaacggtaaagttgatcgtaaagcactgccgaaaccgcaggcggccgc

SEQ ID NO: 112 - protein, 544 aa, Artificial Sequence
  Description of Artificial Sequence: Synthetic polypeptide
LAGHLQQIADCVANNPHIRLGEIDMLLPEEKQQILAGFNDTAVSYALDKTLHQLFEEQVDKTPDQAALLFSEQSLTYSELNERANRLARVLRAKGVGPDRLVAIMAERSPEMVIGILGILKAGGAYVPVDPGYPQERIQYLLEDSNAALLLSQAHLLPLLAQVSSELPECLDLNAELDAGLSGSNLPAVNQPTDLAYVIYTSGTTGKPKGVMIPHQGIVNCLQWRRDEYGFGPSDKALQVFSFAFDGFVASLFAPLLGGATCVLPQEAAAKDPVALKKLMAATEVTHYYGVPSLFQAILDCSTTTDFNQLRCVTLGGEKLPVQLVQKTKEKHPAIEINNEYGPTENSVVTTISRSIEAGQAITIGRPLANVQVYIVDEQHHLQPIGVVGELCIGGAGLARGYLNKPELTAEKFVANPFRPGERMYKTGDLVKWRTDGTIEYIGRADEQVKVRGYRIEIGEIESAVLAYQGIDQAVVVARDDDATAGSYLCAYFVAATAVSVSGLRSHLAKELPAYMIPSYFVELDQLPLSANGKVDRKALPKPQ

SEQ ID NO: 113 - DNA, 1635 bp, Artificial Sequence
  Description of Artificial Sequence: Synthetic polynucleotide
gctagcgggccacctgcagcagatcgcagactgcgttgcgaacaacccggatcagccggtgagcaccatcaacctggttgatgatcgcgaacgcgaattcctgctgaccggtctgaacccgcctgctcaggctcatgaaactaaaccgctgacttactggttcaaagaagctgtaaacgctaacccggacgcgccagctctcacctatagcggtcaaacgctttcttaccgtgaactcgacgaagaagctaaccgtatcgctcgtcgtctgcagaagcacggcgcgggcaaaggctctgttgtggccctgtacaccaaacgtagtctggaactggttatcggcatcttgggtgtgctgaaagcgggcgctgcatacctgccagtagacccgaaactgccggaagatcgtatcagttacatgctggcagactccgctgccgcatgcctgctgacccatcaggagatgaaggaacaggcagccgaactgccgtacaccggtactacgctgttcattgatgatcagacccgctttgaagaacaggcgagcgatccggcaacggctattgacccgaacgaccctgcatacatcatgtacacctccggtaccaccggcaaaccgaaaggtaacatcaccacccacgcgaacattcagggcctggtcaaacatgttgactacatggcgttttctgatcaggacaccttcctgagcgtatctaactatgctttcgatgcattcactttcgacttctatgcctctatgctgaacgcggctcgccttatcatcgcggatgaacataccctgctggacacagagcgtctgactgacctgattctgcaggagaacgtgaacgtaatgtttgcaaccacagcactgttcaacctgctgaccgacgctggtgaagactggatgaaaggtctgcgttgtatcctgtttggtggcgaacgcgcgagtgtcccgcacgtgcgtaaagccctccgcatcatgggcccgggcaaactgatcaactgctacggccctaccgaaggtaccgttttcgcgaccgcacatgtagttcatgacctgccggattccattagctccctgccgattggcaaaccgatcagcaacgcatctgtttacattctgaacgaacagtctcagctgcagccgttcggtgccgttggcgaactgtgcattagcggtatgggggtatctaaaggctacgttaaccgtgctgatctcaccaaagaaaaattcatcgaaaacccatttaaaccgggtgaaaccctgtaccgcaccggtgatctggctcgttggctgccagatggtaccatcgaatacgcgggccgtatcgacgatcaggtaaaaatccgtggccaccgcatcgaactggaggaaatcgaaaagcaactgcaggaatacccgggcgtgaaagatgcggttgttgttgctgatcgccacgagagcggtgatgcatcaatcaatgcatacctggtaaaccgtacacaactgtccgcagaagatgtaaaagctcacctgaaaaaacaactcccggcttacatggtcccgcagactttcacgttcttggatgaactgccgctgaccacaaacggcaaagttaacaaacgcctgctgcccaaaccggacgcggccgc

SEQ ID NO: 114 - protein, 542 aa, Artificial Sequence
  Description of Artificial Sequence: Synthetic polypeptide
LAGHLQQIADCVANNPDQPVSTINLVDDREREFLLTGLNPPAQAHETKPLTYWFKEAVNANPDAPALTYSGQTLSYRELDEEANRIARRLQKHGAGKGSVVALYTKRSLELVIGILGVLKAGAAYLPVDPKLPEDRISYMLADSAAACLLTHQEMKEQAAELPYTGTTLFIDDQTRFEEQASDPATAIDPNDPAYIMYTSGTTGKPKGNITTHANIQGLVKHVDYMAFSDQDTFLSVSNYAFDAFTFDFYASMLNAARLIIADEHTLLDTERLTDLILQENVNVMFATTALFNLLTDAGEDWMKGLRCILFGGERASVPHVRKALRIMGPGKLINCYGPTEGTVFATAHVVHDLPDSISSLPIGKPISNASVYILNEQSQLQPFGAVGELCISGMGVSKGYVNRADLTKEKFIENPFKPGETLYRTGDLARWLPDGTIEYAGRIDDQVKIRGHRIELEEIEKQLQEYPGVKDAVVVADRHESGDASINAYLVNRTQLSAEDVKAHLKKQLPAYMVPQTFTFLDELPLTTNGKVNKRLLPKPD

SEQ ID NO: 115 - DNA, 1614 bp, Artificial Sequence
  Description of Artificial Sequence: Synthetic polynucleotide
gctagcgggccacctgcagcagatcgcagactgcgttgcgaaccacccagacattcagctgtctcaaattgaaatcatgtccgaagacgagcgtaacatgctgttctatcagttcaacgacacaaaaactgattatcctaaagacaaaactatctgtcaactgttcgcggaacgtgccgctcgtatcccggatcacaccgctctggttttcgaagatcagaaactgacctaccgtgaactggatgaacgctccaaccagctggcggggttcttgcgtgaaaaaggtgttgaaccgaacaccgctgtgggcatcatggtggagcgctccccggaaatgatcattggtattctgggcattctgaaagctggcgccgcatatctgccgctggatccagcatatccggaggaccgcatcaaatatatcctggaagactcccagaccaaaattctgctgactcaagacgcactgatgaaagaacgtaccctgattaaagacgctgccatcatgaaaatcgacattcgcgataaccagattgtgcgtcgtaacgccgatcgcctgccgcacttcccacacgctggcgacctggcctacattatctatacctccggcagcactggtaaaccgaaaggtgtgctgatcgaacagaaaggtctgtgcaacctggtccatgccgttattgacctcatgcagctaaaaacagattctcgtgtcatccagttcgcttccctgtccttcgatgcatccgcattcgaaattttctcggcacttgcggccggtgctgcgctggttctgggccgtcaggaggacatgatgccgggccaggctctgaccagtttcctgcgtcaccatgaaattacccatgcgacgctgccgccgacggttctgaacgttttggatgaatcccagctggatcaccttaaagtgatcgtatcagctggttcagcttgttctgaagaactcgcgactcgctggtctggtaaacgtatgttcatcaacgcgtacggtccgaccgaaactaccgtctgcgcaaccgccggcgtgtaccgtggtaccggtcgtccgcatatcggctcccctattgctaacaccaatatctacatcatggaccagaacgtgcaaccggtagccactggcatcgtaggcgaagtgtgcgttgggggtatctccctggctcgtggttacctgaacaaaccggaactgaccgcagagaaattcatcccgcatcctttcgtaccgggtgaacgtctgtaccgcaccggggatctggcacgttggctcccggacggtaacctggaatttctgggccgcattgaccatcaggttaaaatccgtggttaccgcatcgaactgggcgaaatcgaaaaccagctgctgaaacacgataacattgaagaggcggccgttatcgcacgtaccggtaaagataacaacgattatctttgcgcttacattgtctcacagaaacagctgaccgcgactgaagtttctgaatggctcgaaaaagaactgccgcactatatgattccagcttacgtagttaaactggacaaattaccgttgacatccaacgataaagtggatcgcaaagccctcccggaacctgacgcggccgc

SEQ ID NO: 116 - protein, 535 aa, Artificial Sequence
  Description of Artificial Sequence: Synthetic polypeptide
LAGHLQQIADCVANHPDIQLSQIEIMSEDERNMLFYQFNDTKTDYPKDKTICQLFAERAARIPDHTALVFEDQKLTYRELDERSNQLAGFLREKGVEPNTAVGIMVERSPEMIIGILGILKAGAAYLPLDPAYPEDRIKYILEDSQTKILLTQDALMKERTLIKDAAIMKIDIRDNQIVRRNADRLPHFPHAGDLAYIIYTSGSTGKPKGVLIEQKGLCNLVHAVIDLMQLKTDSRVIQFASLSFDASAFEIFSALAAGAALVLGRQEDMMPGQALTSFLRHHEITHATLPPTVLNVLDESQLDHLKVIVSAGSACSEELATRWSGKRMFINAYGPTETTVCATAGVYRGTGRPHIGSPIANTNIYIMDQNVQPVATGIVGEVCVGGISLARGYLNKPELTAEKFIPHPFVPGERLYRTGDLARWLPDGNLEFLGRIDHQVKIRGYRIELGEIENQLLKHDNIEEAAVIARTGKDNNDYLCAYIVSQKQLTATEVSEWLEKELPHYMIPAYVVKLDKLPLTSNDKVDRKALPEPD

SEQ ID NO: 117 - DNA, 1623 bp, Artificial Sequence
  Description of Artificial Sequence: Synthetic polynucleotide
gctagcgggccacctgcagcagatcgcagactgcgttgcgaactgcccgaaaatgcgcatcgaagacatcgaaatcgtgccggaagaagagggtagcctgctgctgcacgatttcaaccgtaccgaagcggaatacccgaaagaccagactatcaacgcgctgttcgaagaacgtgcggaacagcgcgcagatcacccggccctggtgtggggggaacaaaccctgacctaccgtgaactcaatgaacaggctaaccgcctggctaaagtcctgcgcgcccgtggggtgaaagccgatgatatcgttgcgatcatgaccgaacgtagtatggaaatggttatcggaattctgggtactctgaaggcgggcggtgcttacctgccgattgatccgaactacccggaagaacgtatccactatatgctggaggactctggcgcgtcgatgctgctgactcaaaaacacctccgcgacaaactgacctatcacggtcctattatggatgttgatggtgaagacctgaaacacctggaactggacggccatgcgaacctgcagccggctaacaaaccagaagacctggcatacattatttatacctcgggcagcaccggcaaaccgaaaggcgttatggttgaacaccgcggcatcatcaacctgtggcatttttttcaggagcagtggggtgttaacggctcggaccgtatgctgcagttcgccagctcctccttcgacgcctctgtgtgggagatgttcactatcctgcttggcggtggtaccctgtacctggtttctcgcgacattatcaacaacctgaacgagttcgcgcgtttcgtaaacgagaaccagatcacaatcgctctgctgccgcctacctatctggcgggtattgaaccggagaaactgccggctctgaaaaaactggttaccggtgggtctgcgatcacaaaagagctggttactcgttggaaagactccgtagaatatatgaacgcctacggtccgtccgaatcgtctgtcatcgccaccgcatggacctaccgtgaagaagacatggggtatagcagcgtaccgatcggcaaaccgattgcaaacacccgtatttacatcatggacgaacatcagaagctgctgccgttaggtgcggcaggtgaaatgtgtgtggctggcgacggtctggcgcgcggttacctgcaccgcccagaactgaccgccgagaaattcgtggttaacccatatgaagcaggtgaaaaactttaccgtaccggcgatctggttcgttggttgcctgacggtaacattgaattcctgggccgtatcgacgaccaagtgaaaatccgtggtttccgtatcgagctgggtgaaatcgaagcacagctgcagaagcacccgcttgtgcaggaagtagcggttatcgcccgtgaagataagcagaaagaaaagtacctcgcggcgtatattaccgcggaaggtgaaccggaggctgaagagctgcgcgaacagcttctccaggaactgcccgattatatggtaccttccagtttcatgcagctcgagcacatgccgatgactccgtccggcaagattgatcgtaaagcactgccagagccggaagcggccgc

SEQ ID NO: 118 - protein, 538 aa, Artificial Sequence
  Description of Artificial Sequence: Synthetic polypeptide
LAGHLQQIADCVANCPKMRIEDIEIVPEEEGSLLLHDFNRTEAEYPKDQTINALFEERAEQRADHPALVWGEQTLTYRELNEQANRLAKVLRARGVKADDIVAIMTERSMEMVIGILGTLKAGGAYLPIDPNYPEERIHYMLEDSGASMLLTQKHLRDKLTYHGPIMDVDGEDLKHLELDGHANLQPANKPEDLAYIIYTSGSTGKPKGVMVEHRGIINLWHFFQEQWGVNGSDRMLQFASSSFDASVWEMFTILLGGGTLYLVSRDIINNLNEFARFVNENQITIALLPPTYLAGIEPEKLPALKKLVTGGSAITKELVTRWKDSVEYMNAYGPSESSVIATAWTYREEDMGYSSVPIGKPIANTRIYIMDEHQKLLPLGAAGEMCVAGDGLARGYLHRPELTAEKFVVNPYEAGEKLYRTGDLVRWLPDGNIEFLGRIDDQVKIRGFRIELGEIEAQLQKHPLVQEVAVIAREDKQKEKYLAAYITAEGEPEAEELREQLLQELPDYMVPSSFMQLEHMPMTPSGKIDRKALPEPE

SEQ ID NO: 119 - DNA, 1614 bp, Artificial Sequence
  Description of Artificial Sequence: Synthetic polynucleotide
gctagcgggccacctgcagcagatcgcagactgcgttgcgaacaaccttagcatctctgtcaataaaatcgatatgattccgcaggaagaaaaacgttttctgctgtacgaacacaacgatactaatgttgatttctccaaaaaccagctgatccataaactgttcgaggagcaggtggaacgtaccccggattctatcgcagtcgtgttcgaagataagcagctgacctaccgcgaactgaacgaaaagagcaaccagctggcgcgtgcgctgcgtgaaaacggtgttggcagcgacaaaatcgttggcatcctccttgaacgtagcgtggatgttattgttggtatcatgggcatcctgaaagcaggtggcgcctacttgccgatcgacccgacttacccaatcgatcgtattaaatatatcctgcaggatagccagaccgaaattctgctgacgcaggacaaactgattaacctggtagactgtaccgaagtcgacgacatcagcattatcaacatccataacgagcatctgtttaaatacggcaccgaaaatctccgcattgactcgtcgtccaaggacctggtttatgtcatttataccagcggctccactggcaaaccgaaaggcgtgatggttgaacaccattctctggttaacctgtgcaactggcacaacagcttcaataagatctcggagaccgataagaacgcgtcttacgccagcatctcatttgacgcgttcgcatgggaagtttttccgtacatcatcgctggtagcgaaatccacattatcaacgacaatctgaaattggatattacaaaacttaacaaatactttatcgagaaagaaatttcgatttctttcctgcctactcaagtgtgtgaacagttcctgatgttggagaacactagcttacgtcgtctgctgaccggtggtgacaaactgaactacttcgaaaataaatcctatcagatcgtgaacaactacggcccgaccgagaactcggttgtaactacctctttcatcatcgaaaactcctacgataatatcccaatcggcaaaccgatttgcaacaccaaagtttttattctgaacgaatctaacggcctgtgcccgctgggtgtgccgggcgaactgtgcattagcggtgagggtctggctcgcggttacctgaaccgccctgagctgaccgctgagaaattcattccgaacccgttcatccctggtgaacgtatgtaccgtaccggcgacctggttcgtatgctgccggatggtaacatcgagtttctgggtcgcatcgatcatcaggttaaaattcgtggtttccgtatcgagctgggtgaaattgagagccagttactgaaacataaagaagttaaagaagcggtggttattgcgcgtgaagacaacaacaaccaccaatatctgtgcgcgtatttcacctctgaaacctctaaaggcgagacccgtgtacaggagatccgtaaattcctgaccaaagaactgccggagtatatgatcccggcgttcttcgtccagctggataaattaccgctgaccactaacggcaaggtggaccgcaaagcgctgccgagcccggatgcggccgc

SEQ ID NO: 120 - protein, 535 aa, Artificial Sequence
  Description of Artificial Sequence: Synthetic polypeptide
LAGHLQQIADCVANNLSISVNKIDMIPQEEKRFLLYEHNDTNVDFSKNQLIHKLFEEQVERTPDSIAVVFEDKQLTYRELNEKSNQLARALRENGVGSDKIVGILLERSVDVIVGIMGILKAGGAYLPIDPTYPIDRIKYILQDSQTEILLTQDKLINLVDCTEVDDISIINIHNEHLFKYGTENLRIDSSSKDLVYVIYTSGSTGKPKGVMVEHHSLVNLCNWHNSFNKISETDKNASYASISFDAFAWEVFPYIIAGSEIHIINDNLKLDITKLNKYFIEKEISISFLPTQVCEQFLMLENTSLRRLLTGGDKLNYFENKSYQIVNNYGPTENSVVTTSFIIENSYDNIPIGKPICNTKVFILNESNGLCPLGVPGELCISGEGLARGYLNRPELTAEKFIPNPFIPGERMYRTGDLVRMLPDGNIEFLGRIDHQVKIRGFRIELGEIESQLLKHKEVKEAVVIAREDNNNHQYLCAYFTSETSKGETRVQEIRKFLTKELPEYMIPAFFVQLDKLPLTTNGKVDRKALPSPD

SEQ ID NO: 121 - DNA, 6992 bp, Artificial Sequence
  Description of Artificial Sequence: Synthetic polynucleotide
ccatggtggcgaaccaggctaatctgatcgataataaacgtgagctggagcagcacgccctggttccttatgcgcaaggtaaatccatccaccagctgttcgaagaacaggctgaagcgttcccggatcgcgtggcgatcgtattcgaaaaccgccgtctgagctatcaagaactgaaccgtaaagcgaaccaactggcccgtgctctgctggagaaaggtgtgcaaactgactcgatcgtgggcgtaatgatggaaaaatccatcgaaaatgtgatcgcgattctggcggtactgaaggctggcggcgcatatgtgccgattgatattgaatatccgcgcgaccgtattcaatacatcctgcaagactctcaaaccaaaatcgtcctgacacagaaaagcgtttctcagctggtacacgatgtaggttattctggtgaagtcgtcgtcctcgacgaagagcaactggacgcccgtgaaaccgccaaccttcatcaaccgtcgaagccgaccgatctggcatatgtaatctacacttccggtactaccggcaaaccgaaaggcaccatgctggaacacaaaggcatcgcgaatctgcagagctttttccagaacagctttggcgtaactgaacaggatcgtattggcctgttcgcctcgatgtctttcgacgcgtctgtgtgggaaatgtttatggcattactgtctggtgcatcgctgtacatcctgtctaaacagaccatccatgatttcgctgctttcgagcattatctgtcggaaaatgagctgaccatcatcaccctgccaccgacctacctcacgcatctgaccccggaacgcatcaccagcctgcgcatcatgatcaccgcgggctccgcatcttctgcaccgctggtcaataaatggaaggataagttgcgctacatcaacgcctacggcccaaccgaaacatcgatttgtgccacgatctgggaagcaccgagcaaccagctgagcgtgcagtctgtgccgatcggcaaaccgatccagaacactcacatctatatcgtaaacgaagacctgcaactgctgccgaccggttcggaaggcgaactgtgtatcggtggtgttggtctggctcgtggttattggaaccgtcctgatctgactgcggaaaaattcgtggacaatccgttcgtaccgggtgagaagatgtatcgtactggtgacctcgcgaagtggctgaccgacggtaccatcgaattcctgggccgtatcgaccatcaggtcaaaatccgcggccaccgcattgaactgggtgaaattgaatccgtcctgctggcccacgaacacatcactgaagccgttgttattgcacgcgaagatcagcacgcgggtcagtacctgtgtgcctattatatctcccagcaggaagctactccggcgcagctgcgtgactacgcagctcaaaaactgccagcttacatgctgccgagctactttgttaaactggacaaaatgcctctgaccccaaacgataagattgaccgcaaagctttaccggaaccggacgcggccgcgaaccaaagccaggctgcttaccacccgccgcgcactgaaacggaatccattcttgtctcaatctggcagaacgtgctgggcatcgagaaaatcggcattcgtgacaacttctacagcctgggtggcgacagtatccaggctatccaagtagttgcgcgcctgcactcctatcagctgaaactggaaactaaagacctgctgaactacccgacgattgaacaggtagcgctgttcgtcaaatctaccacccgtaaatccgaccagggtatcattgctggaaacgttccgctcacgccgatccagaaatggttcttcggcaaaaacttcaccaacaccggtcattggaatcagtctagcgtgctgtatcgtccagaaggtttcgacccgaaagtcatccagtctgttatggacaaaatcattgaacaccacgatgctctgcgtatggtgtaccagcatgaaaacggtaacgtggtgcagcataaccgcggcctgggtggtcagttgtacgacttcttctcgtataatctgaccgcacagccggatgtgcagcaggctattgaagcggaaacgcaacgtctgcactctagcatgaacttacaggaaggtccactggtaaaagtagccctgttccaaaccctgcacggtgaccatctgttcttggcgatccaccacctggtggtagacggtatctcctggcgcatcctgttcgaggacctggcaaccggctatgctcaggcactggcgggtcaggcgatttccctgccggaaaaaactgattccttccagagctggtcccaatggctgcaggagtacgccaacgaggcagacctgctgtccgaaattccgtactgggaatccctcgaaagccaggcaaaaaacgtttccctgccgaaagactatgaagtaaccgattgcaaacagaaaagcgttcgcaatatgcgtatccgtctccatccggaggaaaccgaacagctgttaaaacacgcaaaccaagcttaccagaccgaaattaacgacttactgctggctgccctgggactggctttcgctgagtggagcaaacttgctcagatcgtgattcacctggaaggtcacggccgcgaagacatcatcgaacaggcgaacgtcgcgcgtaccgtgggctggtttaccagccagtacccggtactgctggatctgaagcagacagccccgctgtctgactatatcaaacttaccaaggagaacatgcgtaaaatcccgcgtaagggcattggttacgacattctgaaacacgttacgctgccggaaaaccgtggctccctgagctttcgcgtgcagccggaagtaacttttaactatctgggccagttcgatgcagatatgcgtaccgaactgttcacccgttccccgtactctggtggcaatactctgggtgcagatggcaaaaacaacctgtctccagaatccgaagtttacactgcactgaacatcactggtctgatcgagggtggtgagctggttctgaccttctcctattcctctgagcagtatcgtgaagaaagcattcagcagctgagccagtcttaccagaaacacctcctggcgattatcgcgcactgtaccgagaaaaaagaggtcgaacgtaccccatcggatttctccgttaagggtcttcaaatggaagaaatggacgacatcttcgaactgctggccaataccctgcgttaactcgagtctggtaaagaaaccgctgctgcgaaatttgaacgccagcacatggactcgtctactagcgcagcttaattaacctaggctgctgccaccgctgagcaataactagcataaccccttggggcctctaaacgggtcttgaggggttttttgctgaaacctcaggcatttgagaagcacacggtcacactgcttccggtagtcaataaaccggtaaaccagcaatagacataagcggctatttaacgaccctgccctgaaccgacgaccgggtcgaatttgctttcgaatttctgccattcatccgcttattatcacttattcaggcgtagcaccaggcgtttaagggcaccaataactgccttaaaaaaattacgccccgccctgccactcatcgcagtactgttgtaattcattaagcattctgccgacatggaagccatcacagacggcatgatgaacctgaatcgccagcggcatcagcaccttgtcgccttgcgtataatatttgcccatagtgaaaacgggggcgaagaagttgtccatattggccacgtttaaatcaaaactggtgaaactcacccagggattggctgagacgaaaaacatattctcaataaaccctttagggaaataggccaggttttcaccgtaacacgccacatcttgcgaatatatgtgtagaaactgccggaaatcgtcgtggtattcactccagagcgatgaaaacgtttcagtttgctcatggaaaacggtgtaacaagggtgaacactatcccatatcaccagctcaccgtctttcattgccatacggaactccggatgagcattcatcaggcgggcaagaatgtgaataaaggccggataaaacttgtgcttatttttctttacggtctttaaaaaggccgtaatatccagctgaacggtctggttataggtacattgagcaactgactgaaatgcctcaaaatgttctttacgatgccattgggatatatcaacggtggtatatccagtgatttttttctccattttagcttccttagctcctgaaaatctcgataactcaaaaaatacgcccggtagtgatcttatttcattatggtgaaagttggaacctcttacgtgccgatcaacgtctcattttcgccaaaagttggcccagggcttcccggtatcaacagggacaccaggatttatttattctgcgaagtgatcttccgtcacaggtatttattcggcgcaaagtgcgtcgggtgatgctgccaacttactgatttagtgtatgatggtgtttttgaggtgctccagtggcttctgtttctatcagctgtccctcctgttcagctactgacggggtggtgcgtaacggcaaaagcaccgccggacatcagcgctagcggagtgtatactggcttactatgttggcactgatgagggtgtcagtgaagtgcttcatgtggcaggagaaaaaaggctgcaccggtgcgtcagcagaatatgtgatacaggatatattccgcttcctcgctcactgactcgctacgctcggtcgttcgactgcggcgagcggaaatggcttacgaacggggcggagatttcctggaagatgccaggaagatacttaacagggaagtgagagggccgcggcaaagccgtttttccataggctccgcccccctgacaagcatcacgaaatctgacgctcaaatcagtggtggcgaaacccgacaggactataaagataccaggcgtttcccctggcggctccctcgtgcgctctcctgttcctgcctttcggtttaccggtgtcattccgctgttatggccgcgtttgtctcattccacgcctgacactcagttccgggtaggcagttcgctccaagctggactgtatgcacgaaccccccgttcagtccgaccgctgcgccttatccggtaactatcgtcttgagtccaacccggaaagacatgcaaaagcaccactggcagcagccactggtaattgatttagaggagttagtcttgaagtcatgcgccggttaaggctaaactgaaaggacaagttttggtgactgcgctcctccaagccagttacctcggttcaaagagttggtagctcagagaaccttcgaaaaaccgccctgcaaggcggttttttcgttttcagagcaagagattacgcgcagaccaaaacgatctcaagaagatcatcttattaatcagataaaatatttctagatttcagtgcaatttatctcttcaaatgtagcacctgaagtcagccccatacgatataagttgtaattctcatgttagtcatgccccgcgcccaccggaaggagctgactgggttgaaggctctcaagggcatcggtcgagatcccggtgcctaatgagtgagctaacttacattaattgcgttgcgctcactgcccgctttccagtcgggaaacctgtcgtgccagctgcattaatgaatcggccaacgcgcggggagaggcggtttgcgtattgggcgccagggtggtttttcttttcaccagtgagacgggcaacagctgattgcccttcaccgcctggccctgagagagttgcagcaagcggtccacgctggtttgccccagcaggcgaaaatcctgtttgatggtggttaacggcgggatataacatgagctgtcttcggtatcgtcgtatcccactaccgagatgtccgcaccaacgcgcagcccggactcggtaatggcgcgcattgcgcccagcgccatctgatcgttggcaaccagcatcgcagtgggaacgatgccctcattcagcatttgcatggtttgttgaaaaccggacatggcactccagtcgccttcccgttccgctatcggctgaatttgattgcgagtgagatatttatgccagccagccagacgcagacgcgccgagacagaacttaatgggcccgctaacagcgcgatttgctggtgacccaatgcgaccagatgctccacgcccagtcgcgtaccgtcttcatgggagaaaataatactgttgatgggtgtctggtcagagacatcaagaaataacgccggaacattagtgcaggcagcttccacagcaatggcatcctggtcatccagcggatagttaatgatcagcccactgacgcgttgcgcgagaagattgtgcaccgccgctttacaggcttcgacgccgcttcgttctaccatcgacaccaccacgctggcacccagttgatcggcgcgagatttaatcgccgcgacaatttgcgacggcgcgtgcagggccagactggaggtggcaacgccaatcagcaacgactgtttgcccgccagttgttgtgccacgcggttgggaatgtaattcagctccgccatcgccgcttccactttttcccgcgttttcgcagaaacgtggctggcctggttcaccacgcgggaaacggtctgataagagacaccggcatactctgcgacatcgtataacgttactggtttcacattcaccaccctgaattgactctcttccgggcgctatcatgccataccgcgaaaggttttgcgccattcgatggtgtccgggatctcgacgctctcccttatgcgactcctgcattaggaaattaatacgactcactataggggaattgtgagcggataacaattcccctgtagaaataattttgtttaactttaataaggagatata

SEQ ID NO: 122 - protein, 177 aa, Artificial Sequence
  Description of Artificial Sequence: Synthetic polypeptide
QQPLALSFAQERQWFLWQLEPESAAYHIPSALRLRGRLDVDALQRSFDSLVARHETLRTRFRLEGGRSYQQVQPAVSVSIEREQFGEEGLIERIQAIVVQPFDLERGPLLRVNLLQLAEDDHVLVLVQHHIVSDGWSMQVMVEELVQLYAAYSQGLDVVLPALPIQYADYALWQRSW

SEQ ID NO: 123 - protein, 120 aa, Artificial Sequence
  Description of Artificial Sequence: Synthetic polypeptide
MEAGEKERQLAYWTGLLGGEQPVLELPFDRPRPARQSHRGAQLGFELSRELVEAVRALAQREGASSFMLLLASFQALLYRYSGQADIRVGVPIANRNRVETERLIGFFVNTQVLKADLDG

SEQ ID NO: 124 - protein, 135 aa, Artificial Sequence
  Description of Artificial Sequence: Synthetic polypeptide
RMGFDELLAQARQRALEAQAHQDLPFEQLVEALQPERNASHNPLFQVLFNHQSEIRSVTPEVQLEDLRLEGLAWDGQTAQFDLTLDIQEDENGIWASFDYATDLFDASTVERLAGHWRNLLRGIVANPRQRLGEL

SEQ ID NO: 125 - protein, 180 aa, Artificial Sequence
  Description of Artificial Sequence: Synthetic polypeptide
MDNLPLSYAQERQWFLWQLEPESSAYHIPTALRLRGRLDIASLQRSFAALVERHESLRTRIARMGDEWVQVVSADVSLALEVEVQRGLDEQRLLERVEAEIARPFDLEQGPLLRVTLLEVDADEHVLVMVQHHIVSDGWSMQLMVEELVQLYAAYSQGLDVVLPALPIQYADYALWQRSW

SEQ ID NO: 126 - protein, 120 aa, Artificial Sequence
  Description of Artificial Sequence: Synthetic polypeptide
MEAGEKERQLAYWTGLLGGEQPVIELPLDHPRQPLRSYRGAQLDLELEPHLALALKQLVQRKGVTMFMLLLASFQALLHRYSGQADIRVGVPIANRNRVETERLIGFFVNTQVLKADING

SEQ ID NO: 127 - protein, 135 aa, Artificial Sequence
  Description of Artificial Sequence: Synthetic polypeptide
RMGFDELLAQARQRALEAQAHQDLPFEQLVEALQPERSLGHNPLFQVMFNHQADSRSANQGVQLPGLSLERMEWRSSSVAFDLTLDVHEAEDGIWASFGYATDLFEASTVERLARHWQNLLRGIVAEPGRPVAEL

SEQ ID NO: 128 - protein, 2137 aa, Streptomyces hygroscopicus
MNKEKDRREESLSPGASRTGTATTPGHRLPLSVDQQAVWVHWQVDPDRSSHIIHMPMLVDEGELDLQRVHAAAAALGQRFPMLRGRIVESGDETELRWDDAPAIPVTEVRTDSPWAETVSRHGAARFDLHQGPLARIQVLHGPDYVVLLIDVHHIVFDGRACGPFLAAFRDAYAGKDLGPADNTEAHVEFARRQHELTHGPEGEKHREHWRRTLGEDLPAPLKLPGGPGEPTFHEVALDPALIAAAHETATAARVHPMIPLYAAFCLLIRDRTGQEDLIVPTPYHGRTRELRDRVGYFSNVLPLRHRLPSGISNRQVLRDLHHNLRDAVRHGSLPYPALLRAAGLTGQQARAHVGQVIFQYWPAPPQDEIDLTALRLTGPDSDAVLRLLATEDYADHTLTVMLREDPRGTSVIWKDPTGAVGRDTVEQLAAAYPVALAELIADLEGTVGATAPDSIAAADRPSPETLLAKELAWNATDADFPDTSLPGLLRTRAAATPDAIAISDGTQRLTYAELTDRAGTLARGLAARGVRPGDLVGLLLPRGIAQVEAVLGTLFAGAVYVPLDVAAPAERHQMILEDSAAVCLVTDGHHDVAGFTGPVIALDELRDARDGELPDIDPGSPAYVIFTSGTTGRPKGVVITHRNVVRLVVNDRLPYDFGPGDVWTLFHSYAFDVSVWEMFGCFAHGGRLVVVGSDEAQDPQRLLTLLRSENVTVLSQTPSAFAQLNGVHGTGQAPLDSLRYVIFAGEKLDPGHLAGFAARHPRTALVNMYGITEVTVHTTFRKITDRDIETGRSNVGVPLPTTSLFILGPDREPLAPGETGEIWVGGLGVADGYLNRPELTAQRFLPNPFGEGTLYRSGDLARRLPDGTVEYVGRADQQVKIRGYRIEPGEIETLLLDHPAVEGAVVLPEAGPGSDQQLVAYLVPHGTPPTTAALRGHLAVRLPDYMLPARFLTVESLPLTVNGKIDTKRLREVGTPLETGQDTDPPRTATARAVAEVWSDLLKVRAPGADQSFFELGGHSLLAARTLREIAKRLDRDVPPLRMFFEHPVLQDFADAFDRLADGPLPAPAPAPTASGEPLPASGFQQRIWFDEQFLEGGGLYQVPMVWRVRGRLDPVVLRTALYRMTERNEILRTAFVQRDGALWQEPGAPWQPEVVHQDLTGIAGHDRDREVTERLRAAAREPVDPGSGMLLRVTLFDLPGEEQLLLLNTHHLVWDGGSAHPFLHELADCYAQSLAPSGPPPALRPQYRDAVGHPVDPAGLDHWAARLDGAPAHPGFEPPLTPGPNGTTPVPLPPQLSDRLAELGKRHGVSPAMVFAAALAAALHGWTGQDDVTFGTPVAGRLHEEYADVIGPLLNTAVLRSTTRQGETVGELLGRLRDTVLDAIDHQEVPFEDVVERLNPPRRPGWSPYVEVMLAVEAEPVTPVPVGPGQVTPYVFEDPEANHLAKFALTVSFREEDGRFTGNIAYRGDRISVEVSRAFAGLLGRTIEALCGPPSQRVDAVPLLGPEEYRRITAFENGAPAAPATTLPSLLAERISELPGAPAVESSRGVLSYGELHARALQLSARIRIAVEGREPIVAIVLGRGEDLVTAMLATWYAGCAFCPIDPDYPDERIRLTLEDVAAGAVIRGPGRRPDTGRIPVLDIGDPSAYEGDTAAPEPHTPDPEAPAYVLYTSGTTGRPKGAVLSHHGLAQLALWHAEAYDVTPQDRASHLSSVGFDATQWEIWPYLAAGACVVAHEKRVVVPELAPWLAERRITMTYLSTPVAEAVWGTGADLPALRWMLFAAAAQTRRPPAGLGYRVANNYGPTEGSVVATWQPGPTPEDAPLNIIGRPIAGKSVYVVDPAGRRCPPGVIGELLIGGVGIALEYRGNPELSRERFLPTGPDGAPGPVYRTGDRARWREDGTLEFLGRMDRQLKVRGHRIEPQEVEAGLLADPLVQRAYVSGDATTLVAHVVPAAQGGRDSRRVLDGLAARMPAHLVPDALMWLDELPTTAHGKVDVARLPRPGRDDLAGARNWVEPSDRLERRIAAVWEAVLDLERVGAADNFFDLGGNSLKLATLHARLLKELDREIPVHRLFEFPTVRQLARFLAPGGDGPDASSPAARDDIAARAARWRSPAPRQSPAAHGTPRRNRNS

SEQ ID NO: 129 - protein, 5097 aa, Goodfellowiella coeruleoviolacea
MATTLPHEQARPLTAAQRGIWYAHSSDPTNPAYYIALYVDVPGPVDRAVFERALRQAVAEAEGLRVCFPQRDDEPSQVVTTPDWSLPVIDFTAEVEPWSAARAWLHARLDQPFDLAAGPLFDFALLVLSADRVLWYARYHHLVIDGVGINLFTRRVCAIYTALVSDTPVPPNPFGSFGDYLDEEARFSSSEEFVAARRSWEKRFADAPLPVRLADGAGDLARDVLRRTTELTPDQVDRLRTAAARAGTRWFGLVVAAVAAYLGRMRGADEVILSLAVTGRASELATTVPTMASNVVPVRLPVRPEMSWAELAAEVAAEIGHARAHQRYRGEDVRKDVGSWDGGRYFGPVVNFMPWDGEFTLGDRTASAHSISTMPVDDLSVVCYRTAGGGLRIDTDAHPDRYREGELETHHRRLLRLLETLADTGPQHRLGEVDLVDAAERQRLLHDMNDTARPVPPATLPELFAAQAAATPDAVAVDSEAGHLSYADLDARANALASRLCSAGVGPSTPVAILMERSVDLVVAILAVTKAGGVYVPLDLRYPTPRMRAVLDDVGARLLLVDQTTRRHEAAEGATVLEVGAAQDGQVGDVPPPHLRPDSLAYIMYTSGSAGTPKGVAVTHRNVVEFVADRRFQAEAHRRVLMHSPHAFDASTYEMWVPLLSGGRVVIAPGEVDAALLRAYAGAGRITALFLTTGLFGVLAEEDPGCFAGLGEVWTGGEAGSPRAFGRVVDACPNTRVISVYGPTETTTFATCQHIGPGIQSERAIPIGRPMDNVRAYVLDDALGLVPQGGVGQLYLAGSGLARGYTNSPGMTAQRFLPDPFGPPGQRMYATGDLVRWRPDATLEFVGRADSQVKLRGFRVEPGDIEAALKRHPAVSQAAVVVRENELTGKRLVAYVVPADGDAPEDESAREQVAEWQEIYRSVYHDAARVALGENFAGWNSSYDAEPIPLAQMREWQDATVASVLQLRPRRVLEIGVGSGLLLARIAPTCEAYWGTDFSAEAIDALRVHLERETAAGNTGLADRVRLRCQPADDVNGLPTGFFDTVILNSVVQYFPNVDYLADVLRAAVDLVVPGGAVFVGDVRLLRLQRSFHTAVELRRAGTGRTLAMLQRSIAQDVLLDKELLVDPEFFHALGTRIEEVDQVRVRIKRGRAHNELTRYRYEAVLRKRAAPGTSAPEDGADQCPVLRWGSDVADLAALAELLTTRRPARALLVRVPNRRVFAEVRAERLARTDSVAAALAALEDNPPTEGAGSVPDPEDVHELGERLGFTVRATWSPEDTEGRLDFFFTTAADAAEPTRTPAGDLATAPLAAYASDPSRSRRLSALATSLAPYLHDRLPDYMVPSAFVVLDRLPLTANGKLDRRALPEPKLDTAEGVNGPRTPVEEILCNLFAEVLGVPRVGVDDRFFDLGGHSLLATRLISRVRATLRVEATVGDLFDAPTVAGFAALLDRERTIRPQLRAMPRPDRVPLSDAQRRLWFLYRLEGASPTYNIPLAVRLTGRLDTAALRAALSDVVSRHESLRTVFPDVQGSPYQHVLQPGAAEPALDVVAVREEDLAAALATACGYGFQLDREPPLRATLFTLDDDTCVLLLVLHHIAGDGWSLRPLSEDLASAYQARRDGHAPEWPPLPVQYADYTRWQHEVLGDADDPDSVAGRQTAYWLSALAGLPERLPLPTDHPRPARSSHRGDTVAFHVDQDLHRELVSLARGTGTTLFMVVQAAIAVLLTRLGAGTDIPIGSPVAGRLDDALDDLVGCFVNTLVLRTDTSGDPSFAELLDRVRATDLAAYENQDLPFEHLVERLNPARTPGHHPLFQVGLSFFSNPDLVIDLPGTEAVAETVHTGTSRFDLSFICYERRGAGQAPVGIDGYVEFSTDLFTRETVTALTRSLVLLLRSVCATPRQRIGEIALADVPRFTAQVEQRPRAVRMSLPTDLDVAGFATREGVEPDTVVLAAAAALLSWYSGGASEVALTFADGDRLLPLRLDVEPQRDFRTLLDAVDREVERVRAESGSSFDDLVRRLASGEPEQGVRMLVQCAASALEDSAELADGHQVSLRLTDGGGQLVVDPALFGDRRARLFAAHFVRLVERVVAEPGVLVGEVEPLTERERREQLVQWCGGGAGYPEVSLVELVRAAARRSPDAVAVVCGERSWTYAELVGRAEGLAGRLVARGVRPGDWVGLVLGRGLAQVEAMLGVLFAGAGYVPVDPAAPAERIGFILEDCQARWVVVDAGAGGGLAGFAGEVLTVEELSAGPVGVLPEVGVDAVAYCIYTSGTTGRPKGVVISHRNVVRLVANDAFPFDYRADDTWALFHSYSFDFSVWEMYCCLIRGGRLVVVSEEDAKDTVRFWRLLDREKVTVISQTPGAFAQLLRVWEGEPDSLRHLRYITFGGEKLRLDLFASWLRARPEVHTINVYGITEATILTTWRRLTADDLDRDGDIGDIGRPFPADRVYVLDAGGGRRLVPVGVVGELYVGGDGVASGYLGRPELDAERFVANPFGEGRLFRSGDLVRFRPDGSLEFVGRADSQVKVRGYRIELGEVEARLAEHASVAEVAVLAEDDRLVAFVRCAGEQPSVGELRADLASRVPEYMVPNEFRVVAAIPLTGNGKRDDRALWESGVPLRQRHVLGLDTDTERYLASLWSRLLNTEVTSADAAFFDIGGHSLLGTKVTACVNELFGIELPLRMLFDTPRLRDLASLIDSMVGDRAEPDDAEDDESAPASSFQQRIWLAEKLEPGTGLYNVPLAWRVAGRLDPVELGAALAGVVARHEILRTRFVERRGRLRQVVDEPWTPVVAHHRLDSAAADRWLRAEADRPFDPSTGPLLRAALLDTPDGQILAITFHHLVFDEGSAPVFLRDLDAAYHRREPDHSGQQTAIGNLGELAEIWADYDAAPPDDQRLVTFGRRLLDWSRRGTARALPEQDEPDTDRIAHDLAWLADRLRGAQQPLRLPEPATPPVAANHEHAEVELPIAGTELHRGLTGLAEREGVDVEHVALAVFAAVLSWYGGRAEFVLGVARPHDSDTGADCPLPLRVSIRPGQSFSALTRRLATELSAVRRHAAAPTEDVLRVLGLAPDADRHGPLDAVLQVHDQRSAQRPQPWRPGYGVGLLLRRHDASITATLRYDDARFDHTRMTAFATHVARLVERVVAEPGVLVGEVEPLTERERREQLVQWCGGGAGYPEVSLVELVRAAARRSPDAVAVVCGERSWTYAELVGRAEGLAGRLVARGVRPGDWVGLVLGRGLAQVEAMLGVLFAGAGYVPVDPAAPAERIGFILEDCQARWVVVDAGAGGGLAGFAGEVLTVEELSAGPVGVLPEVGVDAVAYCIYTSGTTGRPKGVVISHRNVVRLVTNDAFPFQFGPDDTWSLFHSYAFDFSVWELYCCLTHGGRLVVVSEEDAKDTVRFRRLLDREKVTVLNQTPSAFAQLLRVWEGEPDSLRHLRYVIFGGEKLRPRLLADWMRARPEVRMVNMYGITETTVHSTVHVLTPADTEDDASVIGVPIPTTRVYVLDAGGGRRLVPVGVVGELYVGGDGVASGYLGRPELDAERFVANPFGEGRLFRSGDLVRFRPDGSLEFVGRADSQVKVRGYRIELGEVEARLAEHASVAEVAVLAEDDRLVAFVRCAGEQPSVGELRADLASRVPEYMVPNEFRVVAAIPLTGNGKRDDRALWESGVPLRQRHVLGLDTDTERYLASLWSRLLNTEVTSADAAFFDIGGHSLLGTTLIARINERYGTDLPLRALFERPRLRDLAELVDDRAGQQHPSAKAEPSPEEDTFPASGFQERIWIAESLEPGTGLYNVPLAWRVAGRLDPVELGAALAGVVARHEILRTRFVERRGRLRQVVDEPWTPVVAHHRVDSAAADRWLRAEADRPFDPSTGPLLRAALLDTPDGQILAITFHHLVFDGSSVPVFLNELGRCYTGTEAVTAPVGPQYRDFVSARSVVDGAGVDRWVRRLRGAPSYLPLVEPERPGPHGVVPLVLPEDVLARVRRVQDERGMSWFMVVASALAALLHRWTGRDDVTFGFPVANRGSGEFADVLGPCVNTLVVRSRCGEQTTLGQLLDSVRDSVLDALEDRDVPFEEVVSALNPPRRLGSTPYTDVTLNVNFLAAEPVALGDVKLSPLVQESLWEAEVKFGLTVSMLEAGGRMHALLSYRGDRFAARDVERMADALVRLMGRLADTDLPLREVDLGPAGPLPAGGPADTSDRPAEPPAGPQYRDFVSARSVVDGAGVDRWVRRLRGAPSYLPLVEPERPGPHGVVPLVLPEDVLARVRRVQDERGMSWFMVVASALAALLHRWTGRDDVTFGFPVANRGSGEFADVLGPCVNTLVVRSRCGEQTTLGQLLDSVRDSVLDALEDRDVPFEEVVSALNPPRRLGSTPYTDVTLTIQTESPDPVTLGGAGLLPLPVSTATNALGKFALTVSFTVTRDRMTGALAYRGDRFTVDTVRRLARLLTRLLVAVTDATDRDRPLAALDLLGAVDRQAVLDIEAGPAAGQPTTVPALLAATWAQRPHAVAIESSRGALDYATLDRRARVLASSLLPPPGRRDGEPVVALSLGRSEDLVIAMLAAWYAGCAFCPVSPDNPPARTEFILRDLDAHVLVTDNPEAAPPGVRAVRVAQADGPPVTPAPITPESTAYVLYTSGSTGAPKGALISQNGLAQLMRGYVDTFGIHAEDRVSLAANVSFDLAQLEIWSALCSGARLLVYERPVVVPELVSWLADNAITVLHASSPLAEALWTRARPPDCVRWLLFGGAAITQPPPEDLGCQLANLYGPTEATILATAHILRPGGGSPLNCVGRPMPGARVHVLDEHGQRCPIGVTGEIHIAGTGVGKGYWRRAELTDEWFLTRDPDGGRDRVYRTGDLGRWLPDGTLEYQGRRDRQVKLRGFRVEPGEIESALRADPLVAAAAVTVDPERTPALVAYLVAEDAPDTEAVLARLKARLPGFLVPDAVVWLDQLPLSPHGKIDFAALPRPDRADLVGAAPKAEPVGDAERRIAAEWSAVLGIDQIGVHDNFFDLGGDSLKLAALHARLNSALGRDIPIQLLFEFPTVRLLAQSLGQTGRGSGSDPSDAARAAERAANARRARTARRSPRMR

SEQ ID NO: 130 - protein, 1331 aa, Pseudomonas syringae
MINMLSEAVMNSFEKDNTAPSRSQDLAMRAGAQHITGTEGPLSMSQEQAWFLETLVPESIAYNFQAMLNIRGNLDIKVLERALSRVVERHQSLSTVFDEVDGEPRQTIQDAWSVNIPIVDLSASSEAVRQTYMNSIVKAEIAQKIEVAKLPLIRWVLFKFSDQFHVLLHIEHHLIHDGWSFRLFLKELNHFYNEEKGRVNQEPLEPVIQFIDYCQWERDWLASAEGRQGRDFWYGRLETWPAYTHSPFPAEKDAQAALDFVGSSVSVPLPGKLISALQAYGSENKSTLFETMFSLFACVVAARSGQTQQLIGTAVANRDLPGIENTIGMLVNMLPLRIDIDANTSWAPLLAAVKEEIRTACLQSHVPFSTMVADLSPDRVTQQLPYIQVAFSFHNSMSRTLDFADIDVEVVEGLANGSAKFDLNVICVFDDEVNPAAGGRFMLEYSTAVAKEADVRALMADFLHLAGAWLEQPAESLANVRKAAVLAAPSGSSSVNPGVEFWKQSLDLEASGLLPDHGLNRAVSGPLARHEIPLSDESLARLFQACEQRNIEPEAALFSLYAVTMARYGGHQTVVAGLGTAADGQRLATPLPLKLTLAAHDTFADVFLRAQQHCEQARHWHASSAQGLEQALDDSVAASGRAPQSLIQSVFCDGISACAEQGGESGSLHPPIEFVLDRSSTKASLSLAYAADLFAQETATSMAGHYVHLLEKASESLDQTLAQSLSAQHQAAIQTQCEGLDSSYPETSLHAIVEAFAATQPEAIAVRCGDAVLTYAQLNESADKVADTLLRKGVQPGDVVGICMMRSELLVAALLGVLKAGACYLSIDCALPAERRNWLLEEADVKWALIDESAPALRDATSTLLIGQLVNEQDDPRVSPLAKPVISADAHCYYMFTSGSTGTPKATASTHRAVVSLVKGTDYIDIKSDDRFLFFAPLAFDASTFEIWGALLNGAQLVVQPGEAGGLDDLAHTLENQQVSVLWLTSALFQEMVDQYPQAMAGVRHVLTGGDVVSPQSMRSLLARSTGTLTICYGPTEGTVFTTAYSMDKVEQVTDKPLIGWPIAQADAYIVDIFGQLAEPGVPGELFIGGTGITGAYLKRPELSRERFVTLERFPGKTLFRTGDLARWTPSRGIEFLGRSDSQIKIRGLRIEPGEVEQAIRQLPGVTACSLILRTLNLDKQLVAFVSLDGSVALDEQQIRVALRECLPDYMVPAEVHVIGQLPVNASGKVDKRALLELATQNGRARGTSERPSTALEKSIAEVWAHILNVPDVGRNEDFFSIGGHSLAGMRIMSRLSKQFGTRLSLNLLFEYPSVETLAGAIERAAEPLTA

SEQ ID NO: 131 - protein, 4220 aa, Pseudomonas syringae
MVGSNSTPTRFLTSQPPNLPFLAATSVAVEVEMVMSQKKPVTSTTESAVRMPTPAAGGFLNLSPAQKSLWFMHQMEDASATYNVPFALRIDGALDCAALERAVDSVYQRQSALRYRFPCIDGQPVIRLVDEQLLIRKVDLRAEPDSEAALKAFEQSEARYVFDLEHEALLRVTLLHCATDEHVLLINVHHIVFDGWSMQIFLSEVASAYSALVRGSEVKAEPLNFDFGDYLSQSPSNAERAPDIAHWQQRLAGAPPVLPLPLDNKRPAIQRYAGQRCHFQVPAAVSDALKNLAKECRVTPYMVGLAAFSVLLYRYTQESDLVIGSPMSNRQSDDLEGVIGFFVNTLPNRIDASGSPSFVELLKRVRASVLDTFEHAHVPFDQIVEAIQPPRSLSHAPVFQVLFDMANEDFSVELENLRTRVYTLDSCTAKYDLSLTLALTARGMSGAIEYDTALLDERAVQGMIDSLLIIMEQVSRNPDGAIDDFSLLSCEAVEQALRLANHQPAAPQAPFAPFHQWFKRSAAQWGEADALVYENRRYSYAQLDAEARVLAGHLHAAGVRHGDRVAVVQRYGPEVIVALLAVHQVGGIYVPLAIDDARHADLLKDIEPRLVLTLSAYQEQLRGYPCLLQDDLPQATGTLHENEFEGRNTQPEDIAYIIFTSGSTGRPKGVSVSHGSWVSLLQALEQTYGQTEPGVTGILQMANFTFDVFMSDVVRALAVGARLIMCPRQSLADPEQLYELITAERVTLLEFVPAVLRQMIRYLEETGRRLDTLRTLTCGADVWFVHEYRKMQTLCGPQTRVVSVYGVTEATCESATFEPDAGWYDPERSLPIGGPLPNTSLYLVDATLNLVPRTVPGELLIGGGAVASGYMNRPELNEKSFLTGSFSASGRFLPGVGEQRFYRTGDLCRHMRDGTIEFLGRSDNQVKIRGFRIELGEVESVLADHPDVNECAVVTRQSPGAEAELIGYVQTRATAQQLNAYLGERLPGHMVPRLLVVLAALPLTANGKIDRKSLPEPDWTQDSRAYAAPRNSLEEQLVEDWQGLLNIPRIGIDDNFFESGGHSLLVTQVIAQIKKRFGVALSIANLFEGPTVAQVAEKIMLSMIQISQGASVASRPAAIGRSSGIERQRLSFAQRRLWLTQHSEPGTAYNMPEICRLTGQLDIPALEGALNLLLERHEVLRTHFTRELETFVDARGVTQKEPLVVTSHADTARVPFRQQTIAREALTAALEREVHTPFVLDQELPIRALLLQTASDEYVLCLTLHHIAYDGWSSALLRQELAVFYRHLTQGERLTLSALEAQYQDYAAWQRNQLETGAFATQLDAWKSSLQDLPPPLVLPVRSSPREGNPLAGDYVALTLPADCSARLDQLCLRLQCTPAMIMHAAFALLLHRYTGQDDILIGMPFSGRDHDESANLIGFFVNLLPLRLRLRGPLRVAQVIEQSRQALLAAEANHSVPIDYLAQVLNPQRLPGKHPFFQAGLVVQSTTAVPLALPHVKSEEISLASSEVKLDLMLELRAVKGEGVSGVFKYRTSLFERSVISGMAGHFQCLLENMLANDEQTVAQVKMLSAAEHQRLISQYNDTARDFGDGDVVSRFEQRVRQTPQAIALQLQQRCWTYAELDRLANGIAHALIKKGVQAGEHIGLFTGRHPYLVAGMLGILKARCAFVPLNPQDSMEGALGYMIKDAALHRVVGHRGLAHELAALGLDTLLVDDFEGAQGEWSAPACQRELQDLAYILYTSGSTGQPKGVMVSQRNIDNTANAFARTLELTGQSRQLQYFSPVFDGVCGEVFPVLISGATLVFAASEQLLPGPDLVTLLREQHITHLQITPTALRLLPHAELAELKVIISAGEACPANVAQTWAAGRRFLNGYGPTETTVYASARDYWDERGALVLRPLDNVRMYVLDPYLNPLPCGVPGELYIGGSGVAQGYLNLDERTEHVFLPDPYGVLPEARLYRTGDFVVRQFNGSLSYVGRIDNQVKVRGFRIELGDVETRLNAIAGLEQAVVVVKQDDQCNKVLVGYYIGKPSVAQVRAELAKVLPAHMVPERLICLPELPLSRTGKVDRKSLENRVDQRAQEGTAVGTTATLPAAVRPAGKRLHNTVRKIWQEVLDCQEIDSDDNFFDLGGHSLRIVETQKRLSELLQAPVAMTDLFEYPTLRGLVAHLERLHGPLPEVRQASEASPVIDPGNRTLAVVGMAGRFPGAADLSEFWQNLTEGVESTLYFSDEVMLAHGVSPDLLERDDFVKCGNRLEDVDKFDAEFFGFSPREAQLMDPQQRIFLQCAWAAMEAAGYGGALNDLRVGVFASASTSHYLLDHVYPRRQELQLENIQWLLGNGRDFMASRVAYKLNLAGPAITVETACSSSLVAVQMACESLLRGESDMVIVGGASVEAQYYGYQAAPGSIISADGHCRPFDAQASGTTGGSGCAVLVLKLADRAIEDRDHIHALIKGGAINNDGSSKVSYTAPSVHGQAQVVSAALDAANISADSIGYVEAHGTGTRLGDPVEVRALTQAYTSALPHVTPGFCALGSLKSNIGHLDAASGVAGLVKAILAVQHDVLPASLNFTRANPEIDFSDSPFYVNTTSRPWPAAASPRRAGVSSFGIGGTNAHVIVEEPPRPSVRPHDDSERWYILPFSARSAAALDHQRRQLITCLQNPAADLRDIAFTLGEGRTRFAFRDSVVSQSIAGALHALQAPSSTALMERRQDRPIVFMFSGQGSQYTGMFKGLYDSEAVFRQTVDRCAVILQRYGVDILACLYPPAGGETGDTLSRTEVAQPALFVVEYACALLLQGRGIQPQALIGHSLGELVAACFAGVYSLEDSLKLVVERGRLMQRQAPGAMLAVGLSEADCTRFLGHGVELAAVNGPLQCVLAGDFDAIARVERQLADEGLVGRVLDTSHAFHSRMMAPAAHALKAVVNGFSVQPPTIALVSNHNGGWFSIDSSSQSDYWASHLLDTVRFSDGIALLADELEDPIFLEVGPGRALQSALKSYAEPLCVLGCTRHARDSRSDEAALAEGIASLWRQGARFGWAQATGCTDGARVPLPTYPFARDSHWIEAAGTASSAQHEAPLFLHWQRMHGNRRQFRLSLSPQLWLVDEHRVFEGRPVLSGTGCVELVRNAYARMEGIESIELSDVYFPTPLVMEDEQASQRVLITFKDHAESTEFFLESVSDEGNSPQQHTMLHAQGFIKRHDRERSVPTALMQLQADHADCLADEVEHAALNTRLGLFGPRWKCFRSIWLSEDEGLALLELDQAFADDVERFALHPALLDMATGFLSIMENRTRRLPFHYQRLTIHAPLRSRLYSHARRVRSNVYDVQLFEVDNDGGVGALLAEVIGFTLREERVASEAQRTEPLDWCQAPAWRPALPPRSDSPLQGPWLVVMRGVAADNSMLFSLPPDSVCIADAGDSGTAVAIIARGDAQAYEQLFKTLAAQEALPSHIIYMAGGAQPTQGEHAAITLFTDLMSLVQAYIPHAANTTVLSLVTEGACQVDDDEPVNSCVATLSGVVRTLTWELPQIQCRHFDLPLANAAENETLLLQALQHIDPDQASPLASTLALRKQTFHEPCLRALQVLQPPQQFEEGGTYVVTGGLGGMGLALASHLAAKVKAVTLVLMSRSATVTDEVGQALQALEQQGARIQHMAVDCADREVFTAALHQVRRQHGRISGAIHAAGVQASGLIQLSQANAWAQVMGSKVVGTDVLIEVLREEPVEFIFLCSSLASVLGGLGQADYAAANAYLDARAQACRQEGMPVVSLNWDAWAQAGMRVAYDRAHPEQAPIDEVRGLTNAEGCQLFELALAQNTAQIVVSKAQDLQQLINQLQRGGTTSAGRATALFDSGAERVAPRNAVEQEVAQLWQELLGGDMPGVLDNFFDLGGHSLLGSQLISRIRSRFQQCLTLAEFLDEPTIERIARSLGSGADDTPVDADEAAVRYCLVPVQRNGEGRPFFCLPGMGGNVNQVLGLAKAMGMQRPFYGLQCLGLDGKTEPHFSVEEMAEHYIRCMKSVQAHGPYLLGGHSLGGKVAYEIARRLEARGDQVGLLALFDSAAPPYTQMQVPTDAQVLGSLLSIFGHYFDKPIKLGREELLALEHLDDEEKIRYLKDTLERHGLLDARGDEGSIRGLFNVYKAAAAFGMRYDPPKVALDASLVLFRAVDSMPSGINLPEIRDTDAWGWESFSAAKVRTVDVSGDHFTCLSVHAQQIADVLIEQLAECDR

SEQ ID NO: 132 - protein, 4181 aa, Polyangium brachysporum
MSQRSDISSSASPDRHDTTGATTVVSLEPTAAQRRLWFVTGGDLRSATYNVPASFKLTGPLDTQALEQAIDFLVLRHPVLRSRFHTHDGQLRISLAPPSQLLRSLDLSHLPPEHRLAQAAEHGQQHATHVFDLEHERPIRALLLRLDEFEHQLLVNIHHMVFDDWSTTVFFSELGVAYDAFRAGTEPQLPAVRYETADVGAPLDPQQTIRLRDYWARQLEGAPTVHKIPTDRQRPAQRQQAGAVLKHTFGPSIAPGIAKLCRSTGVTPYMVGMAAFATLLHRYSLEDEIVIGSPFANRATEEQQRLIGFFINLIPLRFDFQGADSFLTLLQRVRETMLDAFENARLPFDEIVEVVRPPRSLSHTPIFQVMFDYLKGSPRKLQLQGLDVSGTLVHTGTAKYDLTLSLEDSGTELAGIFEYDTELFDHTTVARLASHFEQLLQTLLAAPQSPLTQGSLVPPAELTQLLQWAQPDEPLVSTGYLSIVERIRASVRRTPHAEAVVYGDHRLTYAELDRRANRVAAGLRARGVTQGQPVATLISYSHELIIAFVAVLKAGGVYLPLGPTDPRVPEKIDDAAPRLILTTTQDRAHLGDALAAQAVLLDELLGIDEGKDMPFDGPELREGDAAYVIYTSGSTGTPKGVEVSHGNLNLSYLAWCQAYRFDTPGRPVTLQLAGPTFDLFIGDVSRTLGCGGCLILCPRDWLLDAEKVHGLMTREKVTFGDFPPVVLRELIRYCSQTGQRLDGLDTLVCGADVWFGHELHAAQALCGPHARVLGSYGVTEATIDSSVFDPALHPLAPGDVVPIGRPLPSCELYVVDERLQLTPIGVPGELLIAGPAVSQRYLNNPALTADKFLSGSIDASGCVVRADGPTRFYRTGDLCRLLPDGTIEFMGRRDHQVKVRGLRVELGEIESALSAHPEVRQCAVIARNERFEETVLVAFAVTDAPVESLHRHLTERLAAHMVPGHIERLERLPLTPSGKIDRKRLKTFDLSAPQQPSRAAPGTDTERRLLTLWQSVLPAPVGGVDQNFFLCGGHSLLATRLIAKVNTAFGVELGVSALFNFPTVAQLAQRIDESAAAASQGAPVPTSVPAHADARWLSFAQQSLWLAAMKQRDDISYHIPVVWRLVGRLDRAALQQAIQDVVHHHPALGSVFSSSLQRLQDDTGAVSLEPVRAAHDATPVELRVVDLSTMPDADLSRRLREEQKIAFDLSRGPLVRAALFTLDDQQHVLCVTLHHIVVDGPSLPLFWADLQAAYQARLHGRTPTLAAAGARYADFVAWQREQLRRPAAQRQLAFWRDRLHALPAPLRLPETTPPSPTHAAAPASLSFPLAAEVVSGIERWSRQHGCTPYMFYCSLFALVLSQATGDTDVVIGTPISLRPSAAFDSVIGLFANTLPLRIRLDGLNRFEDLLLTTKQVCLDVYENAELPFERLVQELKPPRVQGRNPVYQVIFSCELDDTPPLQLEGLAAEPVPLDAYAAKLDLEFALNRSGGVVHAHLMSRAGGFGEAALAAMQQSFLALASAVSHNPALRLEALPRREDLAAQDTASSTPRDLYRLFAERLVDGGDRLALDAPDLKLRYRELEAAAAATAAALQGVGVRRGDRVGIYMGRHPHTVTAMLAINRLGAAFVPLDPDHTLEWNRHIVEDAALSALVCRDGLVASAERFGLPVVTARLADTAAAAPEPVARDLAGECAYVIYTSGSTGRPKGVAVSHESVCHNVLAMRDEMRLTNTSRMAQYVSPIFDVVLGEIFPALASGAAVVFGDRQRLLPGPGLIEWLASERITHWWIVPSALAMVPAAPLPDLQVLIVAGEACPPEVARRWAGGRRLLNGYGPTECAIVVSLTDYWAEGERLVLRPMGGAQLYVLDEAFREVPAGAAGELFLGGICVAQGYLGLPGRTAHTFIADPCSGNTGARLYRTGDVVRRLDDGSIQFIGRVDRQVKIRGFRVELDAVRAALLQLPGVRAAEALVQPDRQGQAQLVGYVVGSGTKAELLEALRRTVPEVMVPSALVFLDQLPTGSTGKVDLRALKALKPGAAPAVSPVEPVVVPPVALPSTTLQRLTRIWCELLERDEIGADENFFDAGGHSLRAVALHQRIGEVFGDLLSLTDVFEYPTLHTLSARLDALLRLNTPATPQNNVPAEAPATEIDPNAIAVIGMVGRFPSAPDLQTFWQRLMAGDEAGVDLTDAQLRARGVPAELIENPRFVRRVKVMDGVADFDAGFFGYSPREAQLMDPQQRLFLEMAWEVLEQAGYGDHGSPRSVGVFGSAAFSYYLLQNVMPNAQALHLEPGQWLIGNDKDFIATRTAYKLNLRGPALSVGTACSSSLSAVHLACASLRAGECEMALAGGMALDAEQAGYVHAEGGILSPDGRCRPFDAKARGTANGSGGGLVLLKPLSAALRDGDTVQAVIKGSAVNNDGAGKVSYTAPSVAGQAAVIQAALQAAGVSPQTIGYVEAHGTGTPLGDPIEVRALTQAFRDAAGEAALPAGSCGLGSVKGNIGHLDAAAGIAGLIKTILALQHETLPPSLNCEQPHPQIRFDETPFDVVRAARPWPRGTAPRRAGVSSFGVGGTNAHVVLEEAPRAVEDGANGTDEGWQLLPVSARSKAALGQQAARLAAHLAVSDSRLRDVAHTLQKGRSAFQHRTFAVGHSVAELATQLASIETLPVSESRSQVPLVFMFPGQGSQYVGMGRDLYTREGVFRREVDRCAELLRPSLGLDVRELMYGSPAEPADPQRLAQTRYTQPALFVVEYALSCQLEAWGIVPQAVIGHSLGELVAACVSGVITLDDALALVALRGATMQAQPAGAMLAVAASREELADLLRIGGELAAVNGPEQFVLAGAPSVVAALEDRCITAGIGCQRLATSHAFHSASMQGAAERVGRAGARLASRLPRIPMISNRSGGWFDERDRRDPAYWGDQLRQPVQFADGISTVLATFDDVVLLEIGPGRTLSSMLTGREGLERSRLLTTMRHAREQTSDEAVLLRSVGTLWARGVNVAWDGLQQPTPGRRVPLPTYPFERSRHWLDRPDGGYLHVAPEGTASLSFQREDSGGGVTTVSCVLDDRPWFIDEHRIFDGQGVLPGTACLELVRRAHATGPGVAGQTLCDVYFPSPLVFEPGARRRVRVVFTQRAGALEFALESATHETPTHWQLHANGQFTTTAATPAFGSPDAIRERFALQPVDDGPARLAQAFADYGPRWRSVSALWLGDGCGLAQLALPTAYTDDLPDFVLHPALLDLATSFLQAWLRPEDGAIPFHYERLTIHQPLRPQCYSLAIETAPRVYDVTVFAWDEQTQRSVVLVHIQGFGLRALRRDAPEVARGCRVVQWVASPLGAHTPAPAPWLLFADEGGDLPDLVAQAPQGSVVVRRSDGFRHFGERQFGLRPGHADDLRQLLTALEPHGGVPQHVVYTWAGAAAEGGGEVFETLITLLQVLARRRGPLRLSLLTRGLRAARTLAACHAATAVGLLKAVQWEFPDIACRHIDLEDTEAATQALLHAELSGWSASAAATGSVDPVSSVTLGQGKRETPQYVALPQPVESDRLVDGGVYLITGGLGGIGFELARHIATRRRGVKLALMSRTGLDGAAPTSPGRAVATDRDACVRLLEEAGAEVLVLQADVADAAQVADAVDRLRQRYGRVHGVVHAAGVEASGLIETGSPAAWRRVLGAKVDGIDHLRDLIEHDRPDFVVLCSSLASVVGGLGQADYAAANAYLDAVARHWRGQGLAAVSVNWDAWSETGMAVAYAARTAKQGATAVQGLTNRQGRLVFDLALGLTHPQLVVNAADFGGAAPRTPARQAKAARVPSSPPTGTDAEQVLTALWQELLGVEQIGLEDDFFELGGHSLLATQLISRVRDLYDRCLTLGEFLDQPTLARILRSLEADAATHQTDNAAVRYCVVPLSKAGTQAPFFCLPGMGGNITQLLPLATALKADRPVIGLQYLGLDGLHEPHTSVEQIAAHYVQCLHSVQPHGPYHFGGHSLGGKVAYEMARQLQSAGDTVGLLALVDSAAPPYSYVPHQDDAAIASVILGIFAYYSGKLEMMEGVDEAALRQLSRPQLLDFIGERLARFELVQAHSDNSSIRGLFNVYRAAADLSPKYNPPRVKLPIPMLLVKAVEPMPQGIHLPEIRDSHAWGWEHFTDLPIEIVEVPGNHYTCLMSEHVEQVATPLRLALAQATKGSSR

SEQ ID NO: 133 - protein, 1083 aa, Polyangium brachysporum
MQANHNTPSYPLSPAQQEIWIAEQLNPGTGVYNTAGYADIRGPVDVARFGAALRQTMAEADCLRAVFHDHGEGPRQTPNDTMAWPFPLIDVSGEPDPQAAAEAWMQADLAQPPDFAHGPLFRMALFRAAPDRFFWYLCGHHLVADAFGLTLLMHRLAEIYSALMLQQAPPPAWFGKLEDMIAADRDYHTSDALEHDRTYWISRLAGCPEAVSLSTGTAAAAAAPPGKFHRQWAELPAATGDALRAIARDNGAGVPPLLIALVAAYLYRMTGQEDLVLGLPVTGRPGRELRRIPGMLANVLPLRFEMTPNLGFGALFQQTAREVRQALRHQRYRGETMLRDLQQAGAVARLYAHNVNVMAFDSEVWFAGHAGRTCNLSNGPVDDLSLTIYDDGEGKGLRIAFDAPAALYTEDELSGHRERFIRLANTLVADLGAPIAAVDLMAAEERQRLLTDWNVAEPSPRRTTLASLFEQQAGRAPDAVALVASEERLTYAALNERANRLAHHLIGLGVGPEDIVAVCLERSADLVVSLLAILKTGAAYLPLDPHYPAARLGFMLADARPAATVTTAGLASQAPGDGTRVHLDDPALVDALRRQPAHDPSDAERIRPLDPEHPAYVIYTSGSTGKPKGVVVPHQNVVRLLDSTEAWFGFGPGDVWTLFHSYAFDFSVWECWGALLRGGRLVVVPYEVSRSPAEFLRLLVHEGVTVLNQTPSAFQQLMQADRDDPTLGQRLQLRFVIFGGEALDVRRLQDWYTRHADTAPQLVNMYGITETTVHVSYLPVTREIAHGQAQHQIGHRIPDLRTYVLDAALRPVPVGATGELYVAGAGLARGYLGRPALTAQRFVADPFGASGSRMYRTGDLARWRADGGLDFLGRADEQVKVRGFRIELGEIALVLARHPAVAQAEVVVREDQPGDKRLVAYVVPAAGSSVDPQVVRAQAAAELPEHMVPAAVVVLDTLPLTANGKLDRGALPAPVFTSRSDRAPGSALEEAVCGLFAELLNVEAVGPDDSFFELGGDSLLAMRAINRLRTVFTVELSIRDLFSSPSVAALTRRIEALRLTENRPAPVPSSPADLRREADTVRS

SEQ ID NO: 134 - protein, 2157 aa, Pseudomonas aeruginosa
MSFARLPIPQTRQEMDNLPLSYAQERQWFLWQLEPESSAYHIPTALRLRGRLDIASLQRSFAALVERHESLRTRIARMGDEWVQVVSADVSLALEVEVQRGLDEQRLLERVEAEIARPFDLEQGPLLRVTLLEVDADEHVLVMVQHHIVSDGWSMQLMVEELVQLYAAYSQGLDVVLPALPIQYADYALWQRSWMEAGEKERQLAYWTGLLGGEQPVIELPLDHPRQPLRSYRGAQLDLELEPHLALALKQLVQRKGVTMFMLLLASFQALLHRYSGQADIRVGVPIANRNRVETERLIGFFVNTQVLKADINGRMGFDELLAQARQRALEAQAHQDLPFEQLVEALQPERSLGHNPLFQVMFNHQADSRSANQGVQLPGLSLERMEWRSSSVAFDLTLDVHEAEDGIWASFGYATDLFEASTVERLARHWQNLLRGIVAEPGRPVAELPLLLDEERDCLSRAWAENADEGGLPPLVQLQIQEQARLRPQAQALALEGQALSYAELNARANRLAHCLIARGVGPDVLVGIAVERSLDMVVGLLAILKAGGAYVPLDPTYPQDRLRHMLEDSAVGLLLSQEHLLPGLPLHEGLEVLSIDRLERDASVSTDDPVVNLRPENLAYVIYTSGSTGKPKGVAISHAALAQFSRIASGYSALTPEDRILQFATLSFDGFVEQLYPALTRGACVVLRGGDLWDTGELYRQIVEQGVTLADLPTAYWNLFLLDALAEPRRSYGALRQIHIGGEAMPLEGPKLWRQAGMGRVRLLNTYGPTEATVVSSVFDCSAENARVGNASPIGQALPGRTLLVLDEHLGLLPVGPVGELYIASRAGLARAYHDRPGLTAERFLPDPFGEPGSRLYRTGDLARRRGDGVIEYMGRADHQVKIRGFRIELGEVEARLLDLEGIREAAALALDGQLVAYLVAEGGEDETRQPALRERIRTALRASLPDYMVPSHLLFLERMPLSPNGKLDRRALPKPDAGLMQRDHMAPASALEKDVAAIWGELLGVERVGLTDNFFELGGHSLLATRLVSRIRQDLGIEVSLKSLFEQPVLQGFVESLGEKPAEVPPITPVTREQPLPLSYAQERQWFLWQLEPESAAYHIPAALRLRGGLDVVALQRSFERLAQRHESLRTRFRQEGLRTVQVVDADGQLQVSRHNLANVDDASLRAAVEAEMARPFDLRTDALLRISLFEVAPNDHVLVMVQHHIVSDGWSMQLMVEELVQLYAAYSQGREAALPALPIQYPDYAVWQREWMEAGERERQLAYWIGLLGGEQPVLELPFDRPRPAEQSFRGARLEFELGAERARRLKALAQRQGASTFMLLLASFQALLYRYSGQSDIRVGVPVANRNRVETERLIGFFVNTQVLKADIDGQMGFDRLLHQVRQRSLEAQAHQDLPFEQLVEALQPERSLSHSPLFQVLFNYQAERGEHGLPEVAGLSIEEQAWESHTAQFDLVLDTCESESDIWAALVYATDLFDASTAERLVRHWQNLLDAILAMPDARLGELDMLDREEREVIGQLWNRSDSGYPATPLVHQRVAERARMAPDAVAVIFDEEKLTYAELDNRANRLAHALIARGVGPEVRVAIAMQRSAEIMVAFLAVLKAGGAYVPLDIEYPRERLLYMMQDSRAHLLLTHSHLLERLPIPEGLSCLSVDREEEWAGFPAHDPEVALHGDNLAYVIYTSGSTGMPKGVAVSHGPLIAHIVATGERYEMTPEDCELHFMSFAFDGSHEGWMHPLINGARVLIRDDSLWLPERTYAEMHRHGVTVGVFPPVYLQQLAEHAERDGNPPPVRVYCFGGDAVAQASYDLAWRALKPKYLFNGYGPTETVVTPLLWKARAGDACGAAYMPIGTLLGNRSGYILDGQLNLLPVGVAGELYLGGEGVARGYLERPALTAERFVPDPFGAPGSRLYRSGDLTRGRADGVVDYLGRVDHQVKIRGFRIELGEIEARLREHPAVREAVVVAQPGAVGQQLVGYVVAQEPAVADSPEAQAECRAQLKTALRERLPEYMVPSHLLFLARMPLTPNGKLDRKGLPQPDASLLQQVYVAPRSDLEQQVAGIWAEVLQLQQVGLDDNFFELGGHSLLATQVIGRLRERLHLEVPIKSMFTAETLGEFCHGVETLKAESAPVEDALAKSLEALKRLSADELEKLIS

SEQ ID NO: 135 - protein, 2448 aa, Pseudomonas aeruginosa
MQALIEKVGSLSPQERKALAVLLKQQGVNLFEIAPVFKRQDGEPLRLSYAQERQWFLWQLEPESAAYHIPSVLRLRGRLDLDALQRSFDSLVARHETLRTRFRLDGDEARQEIAASMALPLDIVALGPLEEGALARQVETTIARPFDLERGPLLRVSLLRLAEDDHVLVLVQHHIVSDGWSMQVMVEELVQLYAAYSRGLEVALPALPIQYADYALWQRSWMEAGEKERQLAYWTGLLGGEQPVLELPFDRPRPVRQSHRGAQFILELDIDLSQALRRVAQQEGATAFALLLASFQALLYRYSGQADIRVGVPIANRNRVETERLIGFFVNTQVLKADLDGRMGFDELLAQARQRALEAQAHQDLPFEQLVEALQPERSLSHNPLFQVLFNYQSEARGNGQAFRFDELQMESVQFDSRTAQFDLTLDLTDEEQRFCAVFDYATDLFDASTVERLAGHWRNLLRGIVANPRQRLGELPLLDAPERRQTLSEWNPAQRECAVQGTLQQRFEEQARQRPQAVALILDEQRLSYGELNARANRLAHCLIARGVGADVPVGLALERSLDMLVGLLAILKAGGAYLPLDPAAPEERLAHILDDSGVRLLLTQGHLLERLPRQAGVEVLAIDGLVLDGYAESDPLPTLSADNLAYVIYTSGSTGKPKGTLLTHRNALRLFSATEAWFGFDERDVWTLFHSYAFDFSVWEIFGALLYGGCLVIVPQWVSRSPEDFYRLLCREGVTVLNQTPSAFKQLMAVACSADMATQQPALRYVIFGGEALDLQSLRPWFQRFGDRQPQLVNMYGITETTVHVTYRPVSEADLEGGLVSPIGGTIPDLSWYILDRDLNPVPRGAVGELYIGRAGLARGYLRRPGLSATRFVPNPFPGGAGERLYRTGDLARFQADGNIEYIGRIDHQVKVRGFRIELGEIEAALAGLAGVRDAVVLAHDGVGGTQLVGYVVADSAEDAERLRESLRESLKRHLPDYMVPAHLMLLERMPLTVNGKLDRQALPQPDASLSQQAYRAPGSELEQRIAAIWSEILGVERVGLDDNFFELGGHSLLATRVISRVRQEQQLDASLKALFERPVLEAFAQGLERTTDAVSTIPLADRQQPLALSFAQERQWFLWQLEPESAAYHIPSALRLRGRLDVDALQRSFDSLVARHETLRTRFRLEGGRSYQQVQPAVSVSIEREQFGEEGLIERIQAIVVQPFDLERGPLLRVNLLQLAEDDHVLVLVQHHIVSDGWSMQVMVEELVQLYAAYSQGLDVVLPALPIQYADYALWQRSWMEAGEKERQLAYWTGLLGGEQPVLELPFDRPRPARQSHRGAQLGFELSRELVEAVRALAQREGASSFMLLLASFQALLYRYSGQADIRVGVPIANRNRVETERLIGFFVNTQVLKADLDGRMGFDELLAQARQRALEAQAHQDLPFEQLVEALQPERNASHNPLFQVLFNHQSEIRSVTPEVQLEDLRLEGLAWDGQTAQFDLTLDIQEDENGIWASFDYATDLFDASTVERLAGHWRNLLRGIVANPRQRLGELPLLDAPERRQTLSEWNPAQRECAVQGTLQQRFEEQARQRPQAVALILDEQRLSYGELNARANRLAHCLIARGVGADVPVGLALERSLDMLVGLLAILKAGGAYLPLDPAAPEERLAHILDDSGVRLLLTQGHLLERLPRQAGVEVLAIDGLVLDGYAESDPLPTLSADNLAYVIYTSGSTGKPKGTLLTHRNALRLFSATEAWFGFDERDVWTLFHSYAFDFSVWEIFGALLYGGRLVIVPQWVSRSPEDFYRLLCREGVTVLNQTPSAFKQLMAVACSADMATQQPALRYVIFGGEALDLQSLRPWFQRFGDRQPQLVNMYGITETTVHVTYRPVSEADLKGGLVSPIGGTIPDLSWYILDRDLNPVPRGAVGELYIGRAGLARGYLRRPGLSATRFVPNPFPGGAGERLYRTGDLARFQADGNIEYIGRIDHQVKVRGFRIELGEIEAALAGLAGVRDAVVLAHDGVGGTQLVGYVVADSAEDAERLRESLRESLKRHLPDYMVPAHLMLLERMPLTVNGKLDRQALPQPDASLSQQAYRAPGSELEQRIAAIWAEILGVERVGLDDNFFELGGHSLLLLMLKERIGDTCQATLSISQLMTHASVAEQAACIEGQARESLLVPLNGRREGSPLFMFHPSFGSVHCYKTLAMALRDRHPVKGVVCRALLGAGREVPEWDDMVAEYAEQLLQEHPEGVFNLAGWSLGGNLAMDVAARLEQRGRQVAFVGWIDAPAPVRVEAFWNEIGPTPEAVPNLSVGEMRVELLGVMFPERAEHIERAWSSICSATTDDEQRWTRMSDWAEAEIGAEFATLRSEIAQSNELEVSWELKQILDERLKAMDYPRLTAKVSLWWAARSTNAIQRSAVERSMAEAIGAERVEPVRVLDTRHDKIIDHPEFVQSFRAALERAGR

SEQ ID NO: 136 - protein, 1088 aa, Brevibacillus parabrevis
MLANQANLIDNKRELEQHALVPYAQGKSIHQLFEEQAEAFPDRVAIVFENRRLSYQELNRKANQLARALLEKGVQTDSIVGVMMEKSIENVIAILAVLKAGGAYVPIDIEYPRDRIQYILQDSQTKIVLTQKSVSQLVHDVGYSGEVVVLDEEQLDARETANLHQPSKPTDLAYVIYTSGTTGKPKGTMLEHKGIANLQSFFQNSFGVTEQDRIGLFASMSFDASVWEMFMALLSGASLYILSKQTIHDFAAFEHYLSENELTIITLPPTYLTHLTPERITSLRIMITAGSASSAPLVNKWKDKLRYINAYGPTETSICATIWEAPSNQLSVQSVPIGKPIQNTHIYIVNEDLQLLPTGSEGELCIGGVGLARGYWNRPDLTAEKFVDNPFVPGEKMYRTGDLAKWLTDGTIEFLGRIDHQVKIRGHRIELGEIESVLLAHEHITEAVVIAREDQHAGQYLCAYYISQQEATPAQLRDYAAQKLPAYMLPSYFVKLDKMPLTPNDKIDRKALPEPDLTANQSQAAYHPPRTETESILVSIWQNVLGIEKIGIRDNFYSLGGDSIQAIQVVARLHSYQLKLETKDLLNYPTIEQVALFVKSTTRKSDQGIIAGNVPLTPIQKWFFGKNFTNTGHWNQSSVLYRPEGFDPKVIQSVMDKIIEHHDALRMVYQHENGNVVQHNRGLGGQLYDFFSYNLTAQPDVQQAIEAETQRLHSSMNLQEGPLVKVALFQTLHGDHLFLAIHHLVVDGISWRILFEDLATGYAQALAGQAISLPEKTDSFQSWSQWLQEYANEADLLSEIPYWESLESQAKNVSLPKDYEVTDCKQKSVRNMRIRLHPEETEQLLKHANQAYQTEINDLLLAALGLAFAEWSKLAQIVIHLEGHGREDIIEQANVARTVGWFTSQYPVLLDLKQTAPLSDYIKLTKENMRKIPRKGIGYDILKHVTLPENRGSLSFRVQPEVTFNYLGQFDADMRTELFTRSPYSGGNTLGADGKNNLSPESEVYTALNITGLIEGGELVLTFSYSSEQYREESIQQLSQSYQKHLLAIIAHCTEKKEVERTPSDFSVKGLQMEEMDDIFELLANTLR

SEQ ID NO: 137 - protein, 3587 aa, Brevibacillus parabrevis
MSVFSKEQVQDMYALTPMQEGMLFHALLDQEHNSHLVQMSISLQGDLDVGLFTDSLHVLVERYDVFRTLFLYEKLKQPLQVVLKQRPIPIEFYDLSACDESEKQLRYTQYKRADQERTFHLAKDPLMRVALFQMSQHDYQVIWSFHHILMDGWCFSIIFDDLLAIYLSLQNKTALSLEPVQPYSRFINWLEKQNKQAALNYWSDYLEAYEQKTTLPKKEAAFAKAFQPTQYRFSLNRTLTKQLGTIASQNQVTLSTVIQTIWGVLLQKYNAAHDVLFGSVVSGRPTDIVGIDKMVGLFINTIPFRVQAKAGQTFSELLQAVHKRTLQSQPYEHVPLYDIQTQSVLKQELIDHLLVIENYPLVEALQKKALNQQIGFTITAVEMFEPTNYDLTVMVMPKEELAFRFDYNAALFDEQVVQKLAGHLQQIADCVANNSGVELCQIPLLTEAETSQLLAKRTETAADYPAATMHELFSRQAEKTPEQVAVVFADQHLTYRELDEKSNQLARFLRKKGIGTGSLVGTLLDRSLDMIVGILGVLKAGGAFVPIDPELPAERIAYMLTHSRVPLVVTQNHLRAKVTTPTETIDINTAVIGEESRAPIESLNQPHDLFYIIYTSGTTGQPKGVMLEHRNMANLMHFTFDQTNIAFHEKVLQYTTCSFDVCYQEIFSTLLSGGQLYLITNELRRHVEKLFAFIQEKQISILSLPVSFLKFIFNEQDYAQSFPRCVKHIITAGEQLVVTHELQKYLRQHRVFLHNHYGPSETHVVTTCTMDPGQAIPELPPIGKPISNTGIYILDEGLQLKPEGIVGELYISGANVGRGYLHQPELTAEKFLDNPYQPGERMYRTGDLALWLPDGQLEFLGRIDHQVKIRGHRIELGEIESRLLNHPAIKEAVVIDRADETGGKFLCAYVVLQKALSDEEMRAYLAQALPEYMIPSFFVTLERIPVTPNGKTDRRALPKPEGSAKTKADYVAPTTELEQKLVAIWEQILGVSPIGIQDHFFTLGGHSLKAIQLISRIQKECQADVPLRVLFEQPTIQALAAYVEGGEESAYLAIPQAEPQAYYPVSSAQKRMLILNQLDPHSTVYNLPVAMILEGTLDKARLEHAISNLVARHESLRTSFHTINGEPVSRIHEQGHLPIVYLETAEEQVNEVILGFMQPFDLVTAPLCRVGLVKLAENRHVLIIDMHHIISDGVSSQLILNDFSRLYQNKALPEQRIHYKDFAVWEKAWTQTTDYQKQEKYWLDRFAGEIPVLNLPMDYPRPAVQSFEGERYLFRTEKQLLESLQDVAQKTGTTLYMVLLAAYHVLLSKYSGQDDVMIGTVTAGRVHPDTESMTGMFVNTLAMRNQSAPTKTFRQFLLEVKDNTLAAFEHGQYPFEELVEKLAIQRNRSRNPLFDTLFILQNMDADLIELDGLTVTPYVPEGEVAKFDLSLEASENQAGLSFCFEFCTKLFARETIERMSLHYLQILQAVSANTEQELAQIEMLTAHEKQELLVHFNDTAALYPAESTLSQLFEDQAQKTPEQTAVVFGDKRLTYRELNERANQLAHTLRAKGVQAEQSVGIMAQRSLEMAIGIIAILKAGGAYVPIDPDYPNERIAYMLEDCRRLVLTQQQLAEKMTANVECLYLDEEGSYSPQTENIEPIHTAADLAYIIYTSGTTGRPKGVMVEHRGIVNSVTWNRDEFALSVRDSGTLSLSFAFDAFALTFFTLIVSGSTVVLMPDHEAKDPIALRNLIAAWECSYVVFVPSMFQAILECSTPADIRSIQAVMLGGEKLSPKLVQLCKAMHPQMSVMNAYGPTESSVMATYLRDTQPDQPITIGRPIANTAIYIVDQHHQLLPVGVVGEICIGGHGLARGYWKKPELTAEKFVANPAVPGERMYKTGDLGRWLHDGTIDFIGRVDDQIKVRGYRIEVGEIEAVLLAYDQTNEAIVVAYQDDRGDSYLAAYVTGKTAIEESELRAHLLRELPAYMVPTYLIQLDAFPLTPNGKVDRKALPKPEGKPATGAAYVAPATEVEAKLVAIWENALGISGVGVLDHFFELGGHSLKAMTVVAQVHREFQIDLLLKQFFAAPTIRDLARLIEHSEQAAGAAIQPAEPQAYYPVSSAQQRMYLLHQLEGAGISYNTPGIIMLEGKLDREQLANALQALVDRHDILRTSFEMVGDELVQKIHDRVAVNMEYVTAEEQQIDDLFHAFVRPFDLSVPPLLRMSLVKLADERHLLLYDMHHIAADAASITILFDELAELYQGRELPEMRIQYKDFAVWQKALHESDAFKQQEAYWLSTFAGNITAVDVPTDFPRPAVKSFAGGQVTLSMDQELLSALHELAAHTNTTLFMVLLAAYNVLLAKYAGQDDIIVGTPISGRSRAELAPVVGMFVHTLAIRNKPTAEKTFKQFLQEVKQNALDAFDHQDYPFESLVEKLGIPRDPGRNPLFDTMFILQNDELHAKTLDQLVYRPYESDSALDVAKFDLSFHLTERETDLFLRLEYCTKLFKQQTVERMAHHFLQILRAVTANPENELQEIEMLTAAEKQMLLVAFNDTHREYRADQTIQQLFEELAEKMPEHTALVFEEKRMSFRELNERANQLAAVLREKGVGPAQIVALLVERSAEMVIATLATLKAGGAFLPVDPDYPEERIRYMLEDSQAKLVVTHAHLLHKVSSQSEVVDVDDPGSYATQTDNLPCANTPSDLAYIIYTSGTTGKPKGVMLEHKGVANLQAVFAHHLGVTPQDRAGHFASISFDASVWDMFGPLLSGATLYVLSRDVINDFQRFAEYVRDNAITFLTLPPTYAIYLEPEQVPSLRTLITAGSASSVALVDKWKEKVTYVNGYGPTESTVCATLWKAKPDEPVETITIGKPIQNTKLYIVDDQLQLKAPGQMGELCISGLSLARGYWNRPELTAEKFVDNPFVPGTKMYRTGDLARWLPDGTIEYLGRIDHQVKIRGHRVELGEVESVLLRYDTVKEAAAITHEDDRGQAYLCAYYVAEGEATPAQLRAYMENELPNYMVPAFFIQLEKMPLTPNDKIDRKALPKPNQEENRTEQYAAPQTELEQLLAGIWADVLGIKQVGTQDNFFELGGDSIKAIQVSTRLNASGWTLAMKELFQYPTIEEAALRVIPNSRESEQGVVEGEIALTPIQKWFFANNFTDRHHWNQAVMLFREDGFDEGLVRQAFQQIVEHHDALRMVYKQEDGAIKQINRGLTDERFRFYSYDLKNHANSEARILELSDQIQSSIDLEHGPLVHVALFATKDGDHLLVAIHHLVVDGVSWRILFEDFSSAYSQALHQQEIVLPKKTDSFKDWAAQLQKYADSDELLREVAYWHNLETTTTTAALPTDFVTADRKQKHTRTLSFALTVPQTENLLRHVHHAYHTEMNDLLLTALGLAVKDWAHTNGVVINLEGHGREDIQNEMNVTRTIGWFTSQYPVVLDMEKAEDLPYQIKQTKENLRRIPKKGIGYEILRTLTTSQLQPPLAFTLRPEISFNYLGQFESDGKTGGFTFSPLGTGQLFSPESERVFLLDISAMIEDGELRISVGYSRLQYEEKTIASLADSYRKHLLGIIEHCMAKEEGEYTPSDLGDEELSMEELENILEWI

SEQ ID NO: 138 - protein, 6486 aa, Brevibacillus parabrevis
MKKQENIAKIYPLTPLQEGMLFHAVTDTGSSAYCLQMSATIEGDFHLPLFEKSLNKLVENYEVLRTAFVYQNMQRPRQVVFKERKVTVPCENIAHLPSAEQDAYIQAYTKQHHAFDLTKDNLMKAAIFQTAENKYRLVWAFHHIIVDGWTLGVLLHKLLTYYAALRKGEPIPREATKPYSEYIKWLDKQNKDEALAYWQNYLAGYDHQAAFPKKKLGTEASRYEHVEAMFTIAPEKTQQLIQIANQNQATMSSVFQALWGILASTYKNADDVVFGSVVSGRPPQIQGIESMVGLFINTIPTRVQTNKQQTFSELLQTVQKQALASATYDFAPLYEIQSTTVLKQELIDHLVTFENYPDHSMKHLEESLGFQFTVESGDEQTSYDLNVVVALAPSNELYVKLSYNAAVYESSFVNRIEGHLRTVIDQVIGNPHVHLHEIGIITEEEKQQLLVAYNDTAAEYPRDKTIFELIAEQASRTPAKAAVVCGEDTLTYQELMERSAQLANALREKGIASGSIVSIMAEHSLELIVAIMAVLRSGAAYLPIDPEYPQDRIQYLLDDSQTTLLLTQSHLQPNIRFAGSVLYLDDRSLYEGGSTSFAPESKPDDLAYMIYTSGSTGNPKGAMITHQGLVNYIWWANKVYVQGEAVDFPLYSSISFDLTVTSIFTPLLSGNTIHVYRGADKVQVILDIIKDNKVGIIKLTPTHLKLIEHIDGKASSIRRFIVGGENLPTKLAKQIYDHFGENVQIFNEYGPTETVVGCMIYLYDPQTTTQESVPIGVPADNVQLYLLDASMQPVPVGSLGEMYIAGDGVAKGYFNRPELTKEKFIDNPFRPGTKMYRTGDLAKWLPDGNMEYAGRMDYQVKIRGHRIEMGEIETRLTQHEAVKEAVVIVEKDESGQNVLYAYLVSERELTVAELREFLGRTLPSYMIPSFFIRLAEIPLTANGKVERKKLPKPAGAVVTGTAYAAPQNEIEAKLAEIWQQVLGISQVGIHDDFFDLGGHSLKAMTVVFQVSKALEVELPVKALFEHPTVAELARFLSRSEKTEYTAIQPVAAQEFYPVSSAQKRMYILQQFEGNGISYNISGAILLEGKLDYARFASAVQQLAERHEALRTSFHRIDGEPVQKVHEEVEVPLFMLEAPEDQAEKIMREFVRPFDLGVAPLMRTGLLKLGKDRHLFLLDMHHIISDGVSSQILLREFAELYQGADLQPLSLQYKDFAAWQNELFQTEAYKKQEQHWLNTFADEIPLLNLPTDYPRPSVQSFAGDLVLFAAGKELLERLQQVASETGTTLYMILLAAYNVLLSKYTGQEDIIVGTPVAGRSHADVENIMGIFVNTLALRNQPASSKTFAQFLQEVKQNALAAYDHQDYPFEELVEKLAIQRDISRNPLFDTLFSLENANQQSLAIAELTASPYELFNKISKFDLALNASESPADIQFQLTFATKLFKKETVERMARHYLEILRWISEQPTASLADIDMMTEAEKRTLLLNVNDTFVERTAATALHQLVEEQAARTPDEVAVVYEEYALTYRELNARANQLARLLRSHGTGPDTLIGIMVDRSPGMVVGMLAVLKAGGAYTPIDPSYPPERIQYMLSDSQAPILLTQRHLQELAAYQGEIIDVDEEAIYTGADTNLDNVAGKDDLAYVIYTSGSTGNPKGVMISHQAICNHMLWMRETFPLTTEDAVLQKTPFSFDASVWEFYLPLITGGQLVLAKPDGHRDIAYMTRLIRDEKITTLQMVPSLLDLVMTDPGWSACTSLQRVFCGGEALTPALVSRFYETQQAQLINLYGPTETTIDATYWPCPRQQEYSAIPIGKPIDNVRLYVVNASNQLQPVGVAGELCIAGDGLARGYWQREELTKASFVDNPFEPGGTMYRTGDMVRYLPDGHIEYLGRIDHQVKIRGHRIELGEIEATLLQHEAVKAVVVMARQDGKGQNSLYAYVVAEQDIQTAELRTYLSATLPAYMVPSAFVFLEQLPLSANGKVDRKALPQPEDAAASAAVYVAPRNEWEAKLAAIWESVLGVEPIGVHDHFFELGGHSLKAMHVISLLQRSFQVDVPLKVLFESPTIAGLAPLVAAARKGTYTAIPPVEKQEYYPVSAAQKRMFILQQMEGAGISYNMPGFMYLDGKLDTERLQQALKSLVQRHESLRTSFHSVQGETVQRVHDDVDLAISFGEATEAETRQIAEQFIQPFDLGTAPLLRAGLIKLAPERHLFMLDLHHIVVDGVSIGLLIEEFAQLYHGEELPALRIQYKDFAKWQQDWFQTEEFAEQEAYWLNTFTGEIPVLNLPTDYPRPSVKSFAGDRFVFGSGTALPKQLHQLAQETGTTLYMVLLAAYNVLLSKYSRQEDIIVGAPTAGRSHAETESIVGMFVNTLALRNEPAGGKTFRDFLAEVKINTLGAFEHQDYPLDELVDKLDMQRDLSRNPLFDTVFILQNMEQKPFEMEQLTITPYSAEVKQAKFDLSLEAYEENAEIIFSLDYSTKLFSRETIEKIATHFIQILRAVIAEPEMPLSEITMLTEAEKQRLLVDFNGAHKDFPQNKTLQALFEEQAEKSPQATAVEISGQPLSYQELNERANQLAATLRERGVQPDQPVGIMANRSVEMVVGILAILKAGGAYVPIDPEYPEERVAYMLTDCQARLVLTQKHLGAKLGSSVTAECLYLDDESNYGVHRSNLQPINTASDLAYIIYTSGTTGKPKGVMVEHRGIVNNVLWKKAEYQMKVGDRSLLSLSFAFDAFVLSFFTPVLSGATVVLAEDEEAKDPVSLKKLIAASRCTLMTGVPSLFQAILECSTPADIRPLQTVTLGGEKITAQLVEKCKQLNPDLVIVNEYGPTESSVVATWQRLAGPDAAITIGRPIANTSLYIVNQYHQLQPIGVVGEICIGGRGLARGYWNKPALTEEKFVSHPFAAGERMYKTGDLGKWLPDGTIEYIGRIDEQVKVRGYRIEIGEIESALLAAEKLTAAVVVVYEDQLGQSALAAYFTADEQLDVTKLWSHLSKRLPSYMIPAHFVQLDQLPLTPNGKVDKKALPKPEGKPVTEAQYVAPTNAVESKLAEIWERVLGVSGIGILDNFFQIGGHSLKAMAVAAQVHREYQVELPLKVLFAQPTIKALAQYVATSGKETYVPIEPAPLQEYYPVSSAQKRMYVLRQFADTGTVYNMPSALYIEGDLDRKRFEAAIHGLVERHESLRTSFHTVNGEPVQRVHEHVELNVQYAEVTEAQVEPTVESFVQAFDLTKAPLLRVGLFKLAAKRHLFLLDMHHIISDGVSAGIIMEEFSKLYRGEELPALSVHYKDFAVWQSELFQSDVYTEHENYWLNAFSGDIPVLNLPADFSRPLTQSFEGDCVSFQADKALLDDLHKLAQESQSTLFMVLLAAYNVLLAKYSGQEDIVVGTPIAGRSHADIENVLGMFVNTLALRNYPVETKHFQAFLEEVKQNTLQAYAHQDYPFEALVEKLDIQRDLSRNPLFDTMFILQNLDQKAYELDGLKLEAYPAQAGNAKFDLTLEAHEDETGIHFALVYSTKLFQRESIERMAGHFLQVLRQVVADQATALREISLLSEEERRIVTVDFNNTFAAYPRDLTIQELFEQQAAKTPEHAAVVMDGQMLTYRELNEKANQLAHVLRQNGVGKESIVGLLADRSLEMITGIMGILKAGGAYLGLDPEHPSERLAYMLEDGGVKVVLVQKHLLPLVGEGLMPIVLEEESLRPEDCGNPAIVNGASDLAYVMYTSGSTGKPKGVMVEHRNVTRLVMHTNYVQVRESDRMIQTGAIGFDAMTFEIFGALLHGASLYLVSKDVLLDAEKLGDFLRTNQITTMWLTSPLFNQLSQDNPAMFDSLRALIVGGEALSPKHINRVKSALPDLEIWNGYGPTENTTFSTCYLIEQHFEEQIPIGKPIANSTAYIVDGNNQPQPIGVPGELCVGGDGVARGYVNKPELTAEKFVPNPFAPGETMYRTGDLARWLPDGTIEYLGRIDQQVKIRGYRIELGEIETVLSQQAQVKEAVVAVIEEANGQKALCAYFVPEQAVDAAELREAMSKQLPGYMVPAYYVQMEKLPLTANGKVDRRALPQPSGERTTGSAFVAAQNDTEAKLQQIWQEVLGIPAIGIHDNFFEIGGHSLKAMNVITQVHKTFQVELPLKALFATPTIHELAAHIAESAFEQFETIQPVEPAAFYPVSFAQKRMYILHQFEGSGISYNVPSVLVLEGKLDYDRFAAAIQSLVKRHESLRTSFHSVNGEPLQRVHPDVELPVRLLEATEDQSESLIQELIQPFDLEIAPLFRVNLIKLGAERHLFFMDMHHIISDGVSLAVIVEEIASLYAGKQLSDLRIQYKDFAVWQTKLAQSDRFQKQEDFWTRTFAGEIPLLNLPHDYPRPSVQSFDGDTVALGTGHHLLEQLRKLAAETGTTLFMVLLAAYHVLLSKYAGQEEIVVGTPIAGRSHADVERIVGMFVNTLALKNTAAGSLSFRAFLEDVKQNALHAFEHQDYPFEHLVEKLQVRRDLSRNPLFDTMFSLGLAESAEGEVADLKVSPYPVNGHIAKFDLSLDAMEKQDGLLVQFSYCTKLFAKETVDRLAAHYVQLLQTITADPDIELARISVLSKAETEHMLHSFLATKTAYPTDKTFQKLFEEQVEKTPNEIAVLFGNEQLTYQELNAKANQLARVLRRKGVKPESTVGILVDRSLYMVIGMLAVLKAGGTFVPIDPDYPLERQAFMLEDSEAKLLLTLQKMNSQVAFPYETFYLDTETVDQEETGNLEHVAQPENVAYIIYTSGTTGKPKGVVIEHRSYANVAFAWKDEYHLDSFPVRLLQMASFAFDVSTGDFARALLTGGQLVICPNGVKMDPASLYETIRRHEITIFEATPALIMPLMHYVYENELDMSQMKLLILGADSCPAEDFKTLLARFGQKMRIINSYGVTEACIDTSYYEETDVTAIRSGTVPIGKPLPNMTMYVVDAHLNLQPVGVVGELCIGGAGVARGYLNRPELTEEKFVPNPFAPGERLYRTGDLAKWRADGNVEFLGRNDHQVKIRGVRIELGEIETQLRKLDGITEAVVVAREDRGQEKELCAYVVADHKLDTAELRANLLKELPQAMIPAYFVTLDALPLTANGKVDRRSLPAPDVTMLRTTEYVAPRSVWEARLAQVWEQVLNVPQVGALDDFFALGGHSLRAMRVLSSMHNEYQVDIPLRILFEKPTIQELAAFIEETAKGNVFSIEPVQKQAYYPVSSAQKRMYILDQFEGVGISYNMPSTMLIEGKLERTRVEAAFQRLIARHESLRTSFAVVNGEPVQNIHEDVPFALAYSEVTEQEARELVSSLVQPFDLEVAPLIRVSLLKIGEDRYVLFTDMHHSISDGVSSGILLAEWVQLYQGDVLPELRIQYKDFAVWQQEFSQSAAFHKQEAYWLQTFADDIPVLNLPTDFTRPSTQSFAGDQCTIGAGKALTEGLHQLAQATGTTLYMVLLAAYNVLLAKYAGQEDIIVGTPITGRSHADLEPIVGMFVNTLAMRNKPQREKTFSEFLQEVKQNALDAYGHQDYPFEELVEKLAIARDLSRNPLFDTVFTFQNSTEEVMTLPECTLAPFMTDETGQHAKFDLTFSATEEREEMTIGVEYSTSLFTRETMERFSRHFLTIAASIVQNPHIRLGEIDMLLPEEKQQILAGFNDTAVSYALDKTLHQLFEEQVDKTPDQAALLFSEQSLTYSELNERANRLARVLRAKGVGPDRLVAIMAERSPEMVIGILGILKAGGAYVPVDPGYPQERIQYLLEDSNAALLLSQAHLLPLLAQVSSELPECLDLNAELDAGLSGSNLPAVNQPTDLAYVIYTSGTTGKPKGVMIPHQGIVNCLQWRRDEYGFGPSDKALQVFSFAFDGFVASLFAPLLGGATCVLPQEAAAKDPVALKKLMAATEVTHYYGVPSLFQAILDCSTTTDFNQLRCVTLGGEKLPVQLVQKTKEKHPAIEINNEYGPTENSVVTTISRSIEAGQAITIGRPLANVQVYIVDEQHHLQPIGVVGELCIGGAGLARGYLNKPELTAEKFVANPFRPGERMYKTGDLVKWRTDGTIEYIGRADEQVKVRGYRIEIGEIESAVLAYQGIDQAVVVARDDDATAGSYLCAYFVAATAVSVSGLRSHLAKELPAYMIPSYFVELDQLPLSANGKVDRKALPKPQQSDATTREYVAPRNATEQQLAAIWQEVLGVEPIGITDQFFELGGHSLKATLLIAKVYEYMQIELPLNLIFQYPTIEKVADFITHKRFESRYGTAILLNQETARNVFCFTPIGAQSVYYQKLAAEIQGVSLYSFDFIQDDNRMEQYIAAITAIDPSGPYTLMGYSSGGNLAFEVAKELEERGYGVTDIILFDSYWKDKAIERTVAETENDIAQLFAEIGENTEMFNMTQEDFQLYAANEFVKQSFVRKTVSYVMFHNNLVNTGMTTAAIHLIQSELEADEEAPVAAKWNESAWANATQRLLTYSGHGIHSRMLAGDYASQNASILQNILQELFILK

SEQ ID NO: 139 - protein, 1098 aa, Aneurinibacillus migulanus
MLNSSKSILIHAQNKNGTHEEEQYLFAVNNTKAEYPRDKTIHQLFEEQVSKRPNNVAIVCENEQLTYHELNVKANQLARIFIEKGIGKDTLVGIMMEKSIDLFIGILAVLKAGGAYVPIDIEYPKERIQYILDDSQARMLLTQKHLVHLIHNIQFNGQVEIFEEDTIKIREGTNLHVPSKSTDLAYVIYTSGTTGNPKGTMLEHKGISNLKVFFENSLNVTEKDRIGQFASISFDASVWEMFMALLTGASLYIILKDTINDFVKFEQYINQKEITVITLPPTYVVHLDPERILSIQTLITAGSATSPSLVNKWKEKVTYINAYGPTETTICATTWVATKETIGHSVPIGAPIQNTQIYIVDENLQLKSVGEAGELCIGGEGLARGYWKRPELTSQKFVDNPFVPGEKLYKTGDQARWLSDGNIEYLGRIDNQVKIRGHRVELEEVESILLKHMYISETAVSVHKDHQEQPYLCAYFVSEKHIPLEQLRQFSSEELPTYMIPSYFIQLDKMPLTSNGKIDRKQLPEPDLTFGMRVDYEAPRNEIEETLVTIWQDVLGIEKIGIKDNFYALGGDSIKAIQVAARLHSYQLKLETKDLLKYPTIDQLVHYIKDSKRRSEQGIVEGEIGLTPIQHWFFEQQFTNMHHWNQSYMLYRPNGFDKEILLRVFNKIVEHHDALRMIYKHHNGKIVQINRGLEGTLFDFYTFDLTANDNEQQVICEESARLQNSINLEVGPLVKIALFHTQNGDHLFMAIHHLVVDGISWRILFEDLATAYEQAMHQQTIALPEKTDSFKDWSIELEKYANSELFLEEAEYWHHLNYYTENVQIKKDYVTMNNKQKNIRYVGMELTIEETEKLLKNVNKAYRTEINDILLTALGFALKEWADIDKIVINLEGHGREEILEQMNIARTVGWFTSQYPVVLDMQKSDDLSYQIKLMKENLRRIPNKGIGYEIFKYLTTEYLRPVLPFTLKPEINFNYLGQFDTDVKTELFTRSPYSMGNSLGPDGKNNLSPEGESYFVLNINGFIEEGKLHITFSYNEQQYKEDTIQQLSRSYKQHLLAIIEHCVQKEDTELTPSDFSFKELELEEMDDIFDLLADSLT

SEQ ID NO: 140 - protein, 4452 aa, Brevibacillus brevis
MSTFKKEHVQDMYRLSPMQEGMLFHALLDKDKNAHLVQMSIAIEGIVDVELLSESLNILIDRYDVFRTTFLHEKIKQPLQVVLKERPVQLQFKDISSLDEEKREQAIEQYKYQDGETVFDLTRDPLMRVAIFQTGKVNYQMIWSFHHILMDGWCFNIIFNDLFNIYLSLKEKKPLQLEAVQPYKQFIKWLEKQDKQEALRYWKEHLMNYDQSVTLPKKKAAINNTTYEPAQFRFAFDKVLTQQLLRIANQSQVTLNIVFQTIWGIVLQKYNSTNHVVYGSVVSGRPSEISGIEKMVGLFINTLPLRIQTQKDQSFIELVKTVHQNVLFSQQHEYFPLYEIQNHTELKQNLIDHIMVIENYPLVEELQKNSIMQKVGFTVRDVKMFEPTNYDMTVMVLPRDEISVRLDYNAAVYDIDFIKKIEGHMKEVALCVANNPHVLVQDVPLLTKQEKQHLLVELHDSITEYPDKTIHQLFTEQVEKTPEHVAVVFEDEKVTYRELHERSNQLARFLREKGVKKESIIGIMMERSVEMIVGILGILKAGGAFVPIDPEYPKERIGYMLDSVRLVLTQRHLKDKFAFTKETIVIEDPSISHELTEEIDYINESEDLFYIIYTSGTTGKPKGVMLEHKNIVNLLHFTFEKTNINFSDKVLQYTNAVLTCVTKKFFSTLLSGGQLYLIRKETQRDVEQLFDLVKRENIEVLSFPVAFLKFIFNEREFINRFPTCVKHIITAGEQLVVNNEFKRYLHEHNVHLHNHYGPSETHVVTTYTINPEAEIPELPPIGKPISNTWIYILDQEQQLQPQGIVGELYISGANVGRGYLNNQELTAEKFFADPFRPNERMYRTGDLARWLPDGNIEFLGRADHQVKIRGHRIELGEIEAQLLNCKGVKEAVVIDKADDKGGKYLCAYVVMEVEVNDSELREYLGKALPDYMIPSFFVPLDHVRLHLNGKIDRKSLPNLEGIVNTNAKYVVPTNELEEKLAKIWEEVLGISQIGIQDNFFSLGGHSLKAITLISRMNKECNVDIPLRLLFEAPTIQEISNYINGAKKESYVAIQPVPEQEYYPVSSVQKRMFILNEFDRSGTAYNLPGVMFLDGKLNYRQLEAAVKKLVERHEALRTSFHSINGEPVQRVHQNVELQIAYSESTEDQVERIIAEFMQPFALEVRPLLRVGLVKLEAERHLFIMDMHHIISDGVSMQIMIQEIADLYKEKELPTLGIQYKDFTVWHNRLLQSDVIEKQEASLAERICRRDSSIESTDRLPKYQPFKALMVKDLHSVQESSLWMIYTRWQQKQEQHYIWFYLLRIMFFLSKYSGQDDIVVGTPIAGRSHADVENMLGMFVNTLAIRSRLNNEDTFKDFLANVKQTALHAYENPDYPFDTLVEKLGIQRDLSRNPLFDTMFVLQNTDRKSFEVEQITITPYVPNSRHSKFDLTLEVSEEQNEILLCLEYCTKLFTDKTVERMAGHFLQILHAIVGNPTIIISEIEILSEEEKQHILFEFNDTKTTYPLCKQFKDYLRNRWRRRADHVAVGWKDQTLTYRELNERANQVARVLRQKGVQPDNIVGLLVERSPEMLVGIMGILKAGGAYLPLDPEYPADRISYMIQDCGVRIMLTQQHLLSLVHDEFDCVILDEDSLYKGDSSNLAPVNQAGDLAYIMYTSGSTGKPKGVMVEHRNVIRLVKNTNYVQVREDDRIIQTGAIGFDALTFEVFGSLLHGAELYPVTKDVLLDAEKLHKFLQANQITIMWLTSPLFNQLSQGTEEMFAGLRSLIVGGDALSPKHINNVKRKCPNLTMWNGYGPTENTTFSTCFLIDKEYDDNIPIGKAISNSTVYIMDRYGQLQPVGVPGELCVGGDGVARGYMNQPALTEEKFVPNPFAPGERMYRTGDLARWLPDGTIEYLGRIDQQVKIRGYRIEPGEIETLLVKHKKVKESVIMVVEDNNGQKALCAYYVPEEEVTVSELREYIAKELPVYMVPAYFVQIEQMPLTQNGKVNRSALPKPDGEFGTATEYVAPSSDIEMKLAEIWHNVLGVNKIGVLDNFFELGGHSLRAMTMISQVHKEFDVELPLKVLFETPTISALAQYIADGQKGMYLAIQPVTPTDYYPVSSAQKRMYILYEFEGAGITYNVPNVMFIEGKLDYQRFEYAIKSLVNRHEALRTSFYSLNGEPVQRVHQNVELQIAYSEAKEDEIEQIVESFVQPFDLEIAPLLRVGLVKLASDRYLFLMDMHHIISDGVSMQIITKEIADLYKGKELAELHIQYKDFAVWQNEWFQSDALEKQKTYWLNTFAEDIPVLNLSTDYPRPTIQSFEGDIVTFSAGKQLAEELKRLAAETGTTLYMLLLAAYNVLLHKYSGQEEIVVGTPIAGRSHADVENIVGMFVNTLALKNTPIAVRTFHEFLLEVKQNALEAFENQDYPFENLIEKLQVRRDLSRNPLFDTMFSLSNIDEQVEIGIEGLNFSPYEMQYWIAKFDISFDILEKQDDIQFYFNYCTNLFKKETIERLATHFMHILQEIVINPEIKLCEINMLSEEEQQRVLYDFNGTDATYATNKIFHELFEEQVEKTPDHIAVIDEREKLSYQELNAKANQLARVLRQKGVQPNSMVGIMVDRSLDMIVGMLGVLKAGGAYVPIDIDYPQERISYMMEDSGAALLLTQQKLTQQIAFSGDILYLDQEEWLHEEASNLEPIARPHYIAYIIYTSGTTGKPKGVMIEHQSYVNVAMAWKDAYRLDTFPVRLLQMASFAFAFDVSAGDFARALLTGGQLIVCPNEVKMDPASLYAIIKKYDITIFEATPALVIPLMEYIYEQKLDISQLQILIVGSDSCSMEDFKTLVSRFGSTIRIVNSYGVTEAALILAIMNQPLSSLHVTGTVPIGKPYANMKMYIMNQYLQIQPVGVIGELCIGGAGVARGYLNRPDLTAEKFVPNPFVPGEKLYRTGDLARWMPDGNVEFLGRNDHQVKIRGIRIELGEIEAQLRKHDSIKEATVIAREDHMKEKYLCAYMVTEGEVNVAELRAYLANDRAAMIPSYFVSLEAMPLTANGKIDKRSLPEPDGSISIGTEYDRPRTMLEGKLEEIWKDVLGLQRVGIHDDFFTIGGHSLKAMAVISQVHKECQTEVPLRVLFETPTIQGLAKYIEETDTEQYMAIQPVSGQDYYPVSSAQKRMFIVNQFVGVGISYNMPSIMLIEGKLERTRLESAFKRLIERHESLRTSFEIINGKPVQKIHEEVDFNMSYQVASNEQVEKMIDEFIQPFDLSVAPLLRVELLKLEEDRHVLIFDMHHIISDGISSNILMKELGELYQGNALPELRIQYKDFAVWQNEWFQSEAFKKQEEYWVNVFADERPILDIPTDYPRPMQQSFDGAQLTFGTGKQLMDGLYRVATETGTTLYMVLLAAYNVLLSKYSGQEDIIVGTPIVGRSHTDLENIVGMFVNTLAMRNKPEGEKTFKAFVSEIKQNALAAFENQDYPFEELIEKLEIQRDLSRNPLFDTLFSLQNIGEESFELAELTCKPFDLVSKLEHAKFDLSLVAVVFEEEIAFGLQYCTKLYKEKTVEQLAQHFIQIVKAIVENPDVKLSDIDMLSEEEKKQIMLEFNDTKIQYTQNQTIQELFEEQVKKTPEHIAIVWEGQALIYHELNIKANQLARVLREKGVTPNHPVAIMTERSLEMIVGIFSILKAGGAYVPIDPAYPQERIQYLLEDSGAALLLTQSHVLNKLPVDIEWLDLTDEQNYVEDGTNLPFMNQSTDLAYIIYTSGTTGKPKGVMIEHQSIINCLQWRKEEYEFGPGDTALQVFSFAFDGFVASLFAPILAGATSVLPKEEEAKDPVALKKLIASEEITHYYGVPSLFSAILDVSSSKDLQNLRCVTLGGEKLPAQIVKKIKEKNKEIEVNNEYGPTENSVVTTIMRDIQVEQEITIGRPLSNVDVYIVNCNHQLQPVGVVGELCIGGQGLARGYLNKPELTADKFVVNPFVPGERMYKTGDLAKWRSDGMIEYVGRVDEQVKVRGYRIELGEIESAILEYEKIKEAVVMVSEHTASEQMLCAYIVGEEDVLTLDLRSYLAKLLPSYMIPNYFIQLDSIPLTPNGKVDRKALPEPQTIGLMAREYVAPRNEIEAQLVLIWQEVLGIELIGITDNFFELGGHSLKATLLVAKIYEYMQIEMPLNVVFKHSTIMKIAEYITHQESENNVHQPILVNVEADREALSLNGEKQRKNIELPILLNEETDRNVFLFAPIGAQGVFYKKLAEQIPTASLYGFDFIEDDDRIQQYIESMIQTQSDGQYVLIGYSSGGNLAFEVAKEMERQGYSVSDLVLFDVYWKGKVFEQTKEEEEENIKIIMEELRENPGMFNMTREDFELYFANEFVKQSFTRKMRKYMSFYTQLVNYGEVEATIHLIQAEFEEEKIDENEKADEEEKTYLEEKWNEKAWNKAAKRFVKYNGYGAHSNMLGGDGLERNSSILKQILQGTFVVK

SEQ ID NO: 141 - DNA, 2921 bp, Artificial Sequence
  Description of Artificial Sequence: Synthetic polynucleotide
tctagaacgacggatgcggtctcgacgataccgcttgccgatcggcagcaaccgttggcactgtccttcgctcaggggcggatgtggttccttgaccagttggaacctcttagctcgttgtacaacatcccgcaggggatacgtctgttcggagccgtcgaggtcgaaaacctgcgtttggcgcttgagcagatcgtggcgcggcatgaatcgctgcgaacgaccttcaagattcttgacggacattcggtgcaagtcgtcgccccgccggcgggcttcgcgttgcccgtgattgaggtgggcgggtcggacgggagtgaacgcgaggccgaggctctccgagtcgtcgaggaagagtcgcagagaccgttcgatttatctaaagggccgctcttgcgcgccctgctgctgcgactcgaccgggacgagcacgtcctgctgctgacgctccaccacatcatctcggacggctggtcgctcggcgtcctcttcgccgaattgggcgcgctctacgaagccttctgtaaaggggaggaggcgcacctgccggagttgcccattcaatacggtgattacgcggcgtggcagcgggagtggctgagtggcgaagtgttggagcggcagacggcttactggcgcgagcaactgggcgggatggcgccgtcgttgaacctgccgacggatcgcccgcgcccggcggtgcagacttcccgcggcgcgcggcagtcctttttggttcccccgtcgttgacgaggtcgttagtggagttgagccgccgcgaaggcgtgacgttgtatatgacgttgctggcggccttccaagtgctgctccaacgctacacggggcaggatgatatttccgtcggctcgccgattgccggccgcacgacggccgagaccgaaggcttaatcggcctcttcatcaacacgctggtgatgcggacggacttgtcgggcgacccgacgttccgtgagctgctggaacgtgtgcggcaggtggcgctgggagcttacgcgcatcaggacgtgccgttcgagaagctggtggagcagttacagccggaacgcgacatgagccgcacgccgctgtttcaggtgatgtttattttgcagaacacgccggggctggcgccgtcgcttgaagggctgaccgtcgagccattgccaatcgagaacgagacggcaaggttcgacctgacgctggcgatggcggaaagcgccgacggattgccgggcgagttcgagtacaacgcggacttgttcgacgcggagacgattgcgcgcctgctggggcacttcacgattctgctggagggcatcgccgccggcgcggacgtttcgatttccgcgttgccgcttctgaccggtgccgagtcccgacggatgctcgtcgagtggaacgacacgcgggaagcgtacgccgccgaccggcgcgtccacgaactattcgaggctcaggcggcgcggacgccggacgcgtcggcggtcgagtcgcaagggcgcgcgctgagttatgccgagctgaatagacgggccaatcaactggcccgccatctgcgacgcatgggcgtcgggccggaagtgctggtcggcatctgcgtcgagaagagcgtcgagatgctggtcgggcttttgggcatactcaaagccgggggggcgtatgtcccgctcgacccggcgttcccggccgagcggctcgccttcatggcggaagacgcggaactgcccgtcctgctgaccgaatcaagactgacggcagtcgtccccccgaaccccacgcgccgtaccgtccttctcgattcggattgggaactcatcgcgggcgagagtggggacgacctgtccgacaccggcggcggcgagaatacggcttacgtgatctacacctcgggctcgaccggcagaccgaagggcgtacaggtttcacaccgcgcgttggttaatttcctgcactcgatgcgcgggcggcccgggatcgaagcaggcgacacgctgctcgccgtcaccaccctctccttcgacatcgccgggctggagctttacctgccgctcttgacgggcgcgcgcgtcgtcgtcgccggccgggaagaactctcagacggagccttgttgtcggagaggataagccgctcgggcgcgaccgtgatgcaggcgaccccggccacctggcgtctgctgctcggggcgggatggcggggcaagagcgatctgcgcatcttctgcggcggcgaggcgctcgcgcgcgaactggcgaatcagttgttggaaaagtgcgccgagctttggaacctctacggcccgacggagacgaccatctggtcggcgattcatcgagtcgagacgacggaaggggccgtgtccgtcggtcgcccgatagccaacacgcgggtctacgtgctcgacaagaatctgcgccccgtgcccgccggagtcccgggcgaactgctcatcggcggcgacggattagcccgggggtatctgaatcgccccgacctgacggccgagaagttcgtgcccgacccgttcggcgatgcccccggcgcgcggctctaccgcacgggcgacctcgcgcgttactcgcccggcggagagcttgagattcttaaccgcgttgacacgcaggtgaagattcgcggcttccgcatcgagccgggtgagatcgagggcgtgctcgaacagcacccggcgattcgtcaggcggtcgtcgtcgcccgcgacgacggcgagggcgagaagcgtctcgtcggttacgtggtcgcgcgcccggagtcggctttgaacgttaacgagctgcgccgctacctgctcgggacgctgccggagtacatggtgccttcggccttcgtcatgctcgacgagttgccgctgacgccgaacggcaagatcgaccgtgaggcgttgccgcaaccggatgcggccgc

SEQ ID NO: 142 - protein, 973 aa, Artificial Sequence
  Description of Artificial Sequence: Synthetic polypeptide
SRTTDAVSTIPLADRQQPLALSFAQGRMWFLDQLEPLSSLYNIPQGIRLFGAVEVENLRLALEQIVARHESLRTTFKILDGHSVQVVAPPAGFALPVIEVGGSDGSEREAEALRVVEEESQRPFDLSKGPLLRALLLRLDRDEHVLLLTLHHIISDGWSLGVLFAELGALYEAFCKGEEAHLPELPIQYGDYAAWQREWLSGEVLERQTAYWREQLGGMAPSLNLPTDRPRPAVQTSRGARQSFLVPPSLTRSLVELSRREGVTLYMTLLAAFQVLLQRYTGQDDISVGSPIAGRTTAETEGLIGLFINTLVMRTDLSGDPTFRELLERVRQVALGAYAHQDVPFEKLVEQLQPERDMSRTPLFQVMFILQNTPGLAPSLEGLTVEPLPIENETARFDLTLAMAESADGLPGEFEYNADLFDAETIARLLGHFTILLEGIAAGADVSISALPLLTGAESRRMLVEWNDTREAYAADRRVHELFEAQAARTPDASAVESQGRALSYAELNRRANQLARHLRRMGVGPEVLVGICVEKSVEMLVGLLGILKAGGAYVPLDPAFPAERLAFMAEDAELPVLLTESRLTAVVPPNPTRRTVLLDSDWELIAGESGDDLSDTGGGENTAYVIYTSGSTGRPKGVQVSHRALVNFLHSMRGRPGIEAGDTLLAVTTLSFDIAGLELYLPLLTGARVVVAGREELSDGALLSERISRSGATVMQATPATWRLLLGAGWRGKSDLRIFCGGEALARELANQLLEKCAELWNLYGPTETTIWSAIHRVETTEGAVSVGRPIANTRVYVLDKNLRPVPAGVPGELLIGGDGLARGYLNRPDLTAEKFVPDPFGDAPGARLYRTGDLARYSPGGELEILNRVDTQVKIRGFRIEPGEIEGVLEQHPAIRQAVVVARDDGEGEKRLVGYVVARPESALNVNELRRYLLGTLPEYMVPSAFVMLDELPLTPNGKIDREALPQPDAA

SEQ ID NO: 143 - DNA, 2909 bp, Artificial Sequence
  Description of Artificial Sequence: Synthetic polynucleotide
tctagaacgacggatgcggtctcgacgataccgcttgccgatcggcagcaaccgttggcactgtccttcgctcaggagcgtcagtggttcctctggcaactggagccggaaagcgcggcctaccatattccgagtgccttgcgcctacgcgggcggctggacgtggatgccttgcaacgcagcttcgacagcctggtcgcgcggcatgaaaccttgcgtacccgcttccggctggagggagggcgttcgtaccagcaggtacaacctgcggttagcgtttccatcgagcgggaacagttcggtgaagaaggcctgatcgaacggatacaggccatcgttgtgcagccattcgacctggaacgggggccgctgctgcgggtgaacctgttgcaactggccgaggacgaccatgtactggtgctggtccagcaccacatcgtgtccgatggttggtcgatgcaggtgatggtcgaggaactggtccagctctatgccgcctatagccaagggctcgacgtggtgttgccagccctgccgatccagtacgcggactacgccctgtggcagcgcagctggatggaggcgggggaaaaggagcgccagttggcgtactggaccggcctgctgggcggcgagcagccggtgctggagttgccgttcgatcggccgcgtccggcccggcagagccatcgtggcgcgcagttgggtttcgagctatcgcgggaactggtcgaggccgtgagagccttggcccagcgtgaaggcgccagtagtttcatgctgttgctggcctcgttccaggcgctgttgtatcgctacagcgggcaggcggatatccgtgtcggtgtgccgatcgccaatcgcaaccgcgtggagaccgagcggctgatcggcttcttcgtcaacacccaggtgctcaaggccgacctggacggtcggatgggcttcgacgagctgctggcccaggcccgccaacgcgcgctggaggcccaggcgcaccaggacctgccgttcgagcaactggtggaagccttgcagccggagcgcaatgccagccacaacccactgttccaggtgctgttcaaccatcagagcgagatacgctcggtgacgcccgaggttcagttggaggacctgcgtctggaaggcctggcctgggacggccagactgcgcagttcgacctgacgctggatattcaggaagacgaaaacggcatctgggcctccttcgactatgccaccgatctgttcgacgcctccaccgtggaacgcctggccggccacttcacgattctgctggagggcatcgccgccggcgcggacgtttcgatttccgcgttgccgcttctgaccggtgccgagtcccgacggatgctcgtcgagtggaacgacacgcgggaagcgtacgccgccgaccggcgcgtccacgaactattcgaggctcaggcggcgcggacgccggacgcgtcggcggtcgagtcgcaagggcgcgcgctgagttatgccgagctgaatagacgggccaatcaactggcccgccatctgcgacgcatgggcgtcgggccggaagtgctggtcggcatctgcgtcgagaagagcgtcgagatgctggtcgggcttttgggcatactcaaagccgggggggcgtatgtcccgctcgacccggcgttcccggccgagcggctcgccttcatggcggaagacgcggaactgcccgtcctgctgaccgaatcaagactgacggcagtcgtccccccgaaccccacgcgccgtaccgtccttctcgattcggattgggaactcatcgcgggcgagagtggggacgacctgtccgacaccggcggcggcgagaatacggcttacgtgatctacacctcgggctcgaccggcagaccgaagggcgtacaggtttcacaccgcgcgttggttaatttcctgcactcgatgcgcgggcggcccgggatcgaagcaggcgacacgctgctcgccgtcaccaccctctccttcgacatcgccgggctggagctttacctgccgctcttgacgggcgcgcgcgtcgtcgtcgccggccgggaagaactctcagacggagccttgttgtcggagaggataagccgctcgggcgcgaccgtgatgcaggcgaccccggccacctggcgtctgctgctcggggcgggatggcggggcaagagcgatctgcgcatcttctgcggcggcgaggcgctcgcgcgcgaactggcgaatcagttgttggaaaagtgcgccgagctttggaacctctacggcccgacggagacgaccatctggtcggcgattcatcgagtcgagacgacggaaggggccgtgtccgtcggtcgcccgatagccaacacgcgggtctacgtgctcgacaagaatctgcgccccgtgcccgccggagtcccgggcgaactgctcatcggcggcgacggattagcccgggggtatctgaatcgccccgacctgacggccgagaagttcgtgcccgacccgttcggcgatgcccccggcgcgcggctctaccgcacgggcgacctcgcgcgttactcgcccggcggagagcttgagattcttaaccgcgttgacacgcaggtgaagattcgcggcttccgcatcgagccgggtgagatcgagggcgtgctcgaacagcacccggcgattcgtcaggcggtcgtcgtcgcccgcgacgacggcgagggcgagaagcgtctcgtcggttacgtggtcgcgcgcccggagtcggctttgaacgttaacgagctgcgccgctacctgctcgggacgctgccggagtacatggtgccttcggccttcgtcatgctcgacgagttgccgctgacgccgaacggcaagatcgaccgtgaggcgttgccgcaaccggatgcggccgc

SEQ ID NO: 144 - protein, 969 aa, Artificial Sequence
  Description of Artificial Sequence: Synthetic polypeptide
SRTTDAVSTIPLADRQQPLALSFAQERQWFLWQLEPESAAYHIPSALRLRGRLDVDALQRSFDSLVARHETLRTRFRLEGGRSYQQVQPAVSVSIEREQFGEEGLIERIQAIVVQPFDLERGPLLRVNLLQLAEDDHVLVLVQHHIVSDGWSMQVMVEELVQLYAAYSQGLDVVLPALPIQYADYALWQRSWMEAGEKERQLAYWTGLLGGEQPVLELPFDRPRPARQSHRGAQLGFELSRELVEAVRALAQREGASSFMLLLASFQALLYRYSGQADIRVGVPIANRNRVETERLIGFFVNTQVLKADLDGRMGFDELLAQARQRALEAQAHQDLPFEQLVEALQPERNASHNPLFQVLFNHQSEIRSVTPEVQLEDLRLEGLAWDGQTAQFDLTLDIQEDENGIWASFDYATDLFDASTVERLAGHFTILLEGIAAGADVSISALPLLTGAESRRMLVEWNDTREAYAADRRVHELFEAQAARTPDASAVESQGRALSYAELNRRANQLARHLRRMGVGPEVLVGICVEKSVEMLVGLLGILKAGGAYVPLDPAFPAERLAFMAEDAELPVLLTESRLTAVVPPNPTRRTVLLDSDWELIAGESGDDLSDTGGGENTAYVIYTSGSTGRPKGVQVSHRALVNFLHSMRGRPGIEAGDTLLAVTTLSFDIAGLELYLPLLTGARVVVAGREELSDGALLSERISRSGATVMQATPATWRLLLGAGWRGKSDLRIFCGGEALARELANQLLEKCAELWNLYGPTETTIWSAIHRVETTEGAVSVGRPIANTRVYVLDKNLRPVPAGVPGELLIGGDGLARGYLNRPDLTAEKFVPDPFGDAPGARLYRTGDLARYSPGGELEILNRVDTQVKIRGFRIEPGEIEGVLEQHPAIRQAVVVARDDGEGEKRLVGYVVARPESALNVNELRRYLLGTLPEYMVPSAFVMLDELPLTPNGKIDREALPQPDAA

SEQ ID NO: 145 - DNA, 2909 bp, Artificial Sequence
  Description of Artificial Sequence: Synthetic polynucleotide
tctagaacgacggatgcggtctcgacgataccgcttgccgatcggcagcaaccgttggcactgtccttcgctcaggagcgtcagtggttcctctggcaactggagccggaaagcgcggcctaccatattccgagtgccttgcgcctacgcgggcggctggacgtggatgccttgcaacgcagcttcgacagcctggtcgcgcggcatgaaaccttgcgtacccgcttccggctggagggagggcgttcgtaccagcaggtacaacctgcggttagcgtttccatcgagcgggaacagttcggtgaagaaggcctgatcgaacggatacaggccatcgttgtgcagccattcgacctggaacgggggccgctgctgcgggtgaacctgttgcaactggccgaggacgaccatgtactggtgctggtccagcaccacatcgtgtccgatggttggtcgatgcaggtgatggtcgaggaactggtccagctctatgccgcctatagccaagggctcgacgtggtgttgccagccctgccgatccagtacgcggactacgccctgtggcagcgcagctggatggaggcgggggaaaaggagcgccagttggcgtactggaccggcctgctgggcggcgagcagccggtgctggagttgccgttcgatcggccgcgtccggcccggcagagccatcgtggcgcgcagttgggtttcgagctatcgcgggaactggtcgaggccgtgagagccttggcccagcgtgaaggcgccagtagtttcatgctgttgctggcctcgttccaggcgctgttgtatcgctacagcgggcaggcggatatccgtgtcggtgtgccgatcgccaatcgcaaccgcgtggagaccgagcggctgatcggcttcttcgtcaacacccaggtgctcaaggccgacctggacggtcggatgggcttcgacgagctgctggcccaggcccgccaacgcgcgctggaggcccaggcgcaccaggacctgccgttcgagcaactggtggaagccttgcagccggagcgcaatgccagccacaacccactgttccaggtgctgttcaaccatcagagcgagatacgctcggtgacgcccgaggttcagttggaggacctgcgtctggaaggcctggcctgggacggccagactgcgcagttcgacctgacgctggatattcaggaagacgaaaacggcatctgggcctccttcgactatgccaccgatctgttcgacgcctccaccgtggaacgcctggccggccattggcgcaacctgttgcgcggcatcgtcgccggcgcggacgtttcgatttccgcgttgccgcttctgaccggtgccgagtcccgacggatgctcgtcgagtggaacgacacgcgggaagcgtacgccgccgaccggcgcgtccacgaactattcgaggctcaggcggcgcggacgccggacgcgtcggcggtcgagtcgcaagggcgcgcgctgagttatgccgagctgaatagacgggccaatcaactggcccgccatctgcgacgcatgggcgtcgggccggaagtgctggtcggcatctgcgtcgagaagagcgtcgagatgctggtcgggcttttgggcatactcaaagccgggggggcgtatgtcccgctcgacccggcgttcccggccgagcggctcgccttcatggcggaagacgcggaactgcccgtcctgctgaccgaatcaagactgacggcagtcgtccccccgaaccccacgcgccgtaccgtccttctcgattcggattgggaactcatcgcgggcgagagtggggacgacctgtccgacaccggcggcggcgagaatacggcttacgtgatctacacctcgggctcgaccggcagaccgaagggcgtacaggtttcacaccgcgcgttggttaatttcctgcactcgatgcgcgggcggcccgggatcgaagcaggcgacacgctgctcgccgtcaccaccctctccttcgacatcgccgggctggagctttacctgccgctcttgacgggcgcgcgcgtcgtcgtcgccggccgggaagaactctcagacggagccttgttgtcggagaggataagccgctcgggcgcgaccgtgatgcaggcgaccccggccacctggcgtctgctgctcggggcgggatggcggggcaagagcgatctgcgcatcttctgcggcggcgaggcgctcgcgcgcgaactggcgaatcagttgttggaaaagtgcgccgagctttggaacctctacggcccgacggagacgaccatctggtcggcgattcatcgagtcgagacgacggaaggggccgtgtccgtcggtcgcccgatagccaacacgcgggtctacgtgctcgacaagaatctgcgccccgtgcccgccggagtcccgggcgaactgctcatcggcggcgacggattagcccgggggtatctgaatcgccccgacctgacggccgagaagttcgtgcccgacccgttcggcgatgcccccggcgcgcggctctaccgcacgggcgacctcgcgcgttactcgcccggcggagagcttgagattcttaaccgcgttgacacgcaggtgaagattcgcggcttccgcatcgagccgggtgagatcgagggcgtgctcgaacagcacccggcgattcgtcaggcggtcgtcgtcgcccgcgacgacggcgagggcgagaagcgtctcgtcggttacgtggtcgcgcgcccggagtcggctttgaacgttaacgagctgcgccgctacctgctcgggacgctgccggagtacatggtgccttcggccttcgtcatgctcgacgagttgccgctgacgccgaacggcaagatcgaccgtgaggcgttgccgcaaccggatgcggccgc

SEQ ID NO: 146 - protein, 969 aa, Artificial Sequence
  Description of Artificial Sequence: Synthetic polypeptide
SRTTDAVSTIPLADRQQPLALSFAQERQWFLWQLEPESAAYHIPSALRLRGRLDVDALQRSFDSLVARHETLRTRFRLEGGRSYQQVQPAVSVSIEREQFGEEGLIERIQAIVVQPFDLERGPLLRVNLLQLAEDDHVLVLVQHHIVSDGWSMQVMVEELVQLYAAYSQGLDVVLPALPIQYADYALWQRSWMEAGEKERQLAYWTGLLGGEQPVLELPFDRPRPARQSHRGAQLGFELSRELVEAVRALAQREGASSFMLLLASFQALLYRYSGQADIRVGVPIANRNRVETERLIGFFVNTQVLKADLDGRMGFDELLAQARQRALEAQAHQDLPFEQLVEALQPERNASHNPLFQVLFNHQSEIRSVTPEVQLEDLRLEGLAWDGQTAQFDLTLDIQEDENGIWASFDYATDLFDASTVERLAGHWRNLLRGIVAGADVSISALPLLTGAESRRMLVEWNDTREAYAADRRVHELFEAQAARTPDASAVESQGRALSYAELNRRANQLARHLRRMGVGPEVLVGICVEKSVEMLVGLLGILKAGGAYVPLDPAFPAERLAFMAEDAELPVLLTESRLTAVVPPNPTRRTVLLDSDWELIAGESGDDLSDTGGGENTAYVIYTSGSTGRPKGVQVSHRALVNFLHSMRGRPGIEAGDTLLAVTTLSFDIAGLELYLPLLTGARVVVAGREELSDGALLSERISRSGATVMQATPATWRLLLGAGWRGKSDLRIFCGGEALARELANQLLEKCAELWNLYGPTETTIWSAIHRVETTEGAVSVGRPIANTRVYVLDKNLRPVPAGVPGELLIGGDGLARGYLNRPDLTAEKFVPDPFGDAPGARLYRTGDLARYSPGGELEILNRVDTQVKIRGFRIEPGEIEGVLEQHPAIRQAVVVARDDGEGEKRLVGYVVARPESALNVNELRRYLLGTLPEYMVPSAFVMLDELPLTPNGKIDREALPQPDAA

SEQ ID NO: 147 - DNA, 2909 bp, Artificial Sequence
  Description of Artificial Sequence: Synthetic polynucleotide
tctagaacgacggatgcggtctcgacgataccgcttgccgatcggcagcaaccgttggcactgtccttcgctcaggagcgtcagtggttcctctggcaactggagccggaaagcgcggcctaccatattccgagtgccttgcgcctacgcgggcggctggacgtggatgccttgcaacgcagcttcgacagcctggtcgcgcggcatgaaaccttgcgtacccgcttccggctggagggagggcgttcgtaccagcaggtacaacctgcggttagcgtttccatcgagcgggaacagttcggtgaagaaggcctgatcgaacggatacaggccatcgttgtgcagccattcgacctggaacgggggccgctgctgcgggtgaacctgttgcaactggccgaggacgaccatgtactggtgctggtccagcaccacatcgtgtccgatggttggtcgatgcaggtgatggtcgaggaactggtccagctctatgccgcctatagccaagggctcgacgtggtgttgccagccctgccgatccagtacgcggactacgccctgtggcagcgcagctggatggaggcgggggaaaaggagcgccagttggcgtactggaccggcctgctgggcggcgagcagccggtgctggagttgccgttcgatcggccgcgtccggcccggcagagccatcgtggcgcgcagttgggtttcgagctatcgcgggaactggtcgaggccgtgagagccttggcccagcgtgaaggcgccagtagtttcatgctgttgctggcctcgttccaggcgctgttgtatcgctacagcgggcaggcggatatccgtgtcggtgtgccgatcgccaatcgcaaccgcgtggagaccgagcggctgatcggcttcttcgtcaacacccaggtgctcaaggccgacctggacggtcggatgggcttcgacgagctgctggcccaggcccgccaacgcgcgctggaggcccaggcgcaccaggacctgccgttcgagcaactggtggaagccttgcagccggagcgcaatgccagccacaacccactgttccaggtgctgttcaaccatcagagcgagatacgctcggtgacgcccgaggttcagttggaggacctgcgtctggaaggcctggcctgggacggccagactgcgcagttcgacctgacgctggatattcaggaagacgaaaacggcatctgggcctccttcgactatgccaccgatctgttcgacgcctccaccgtggaacgcctggccggccattggcgcaacctgttgcgcggcatcgtcgccaacccacgacagcggctcggcgagttgccgctgctggatggtgccgagtcccgacggatgctcgtcgagtggaacgacacgcgggaagcgtacgccgccgaccggcgcgtccacgaactattcgaggctcaggcggcgcggacgccggacgcgtcggcggtcgagtcgcaagggcgcgcgctgagttatgccgagctgaatagacgggccaatcaactggcccgccatctgcgacgcatgggcgtcgggccggaagtgctggtcggcatctgcgtcgagaagagcgtcgagatgctggtcgggcttttgggcatactcaaagccgggggggcgtatgtcccgctcgacccggcgttcccggccgagcggctcgccttcatggcggaagacgcggaactgcccgtcctgctgaccgaatcaagactgacggcagtcgtccccccgaaccccacgcgccgtaccgtccttctcgattcggattgggaactcatcgcgggcgagagtggggacgacctgtccgacaccggcggcggcgagaatacggcttacgtgatctacacctcgggctcgaccggcagaccgaagggcgtacaggtttcacaccgcgcgttggttaatttcctgcactcgatgcgcgggcggcccgggatcgaagcaggcgacacgctgctcgccgtcaccaccctctccttcgacatcgccgggctggagctttacctgccgctcttgacgggcgcgcgcgtcgtcgtcgccggccgggaagaactctcagacggagccttgttgtcggagaggataagccgctcgggcgcgaccgtgatgcaggcgaccccggccacctggcgtctgctgctcggggcgggatggcggggcaagagcgatctgcgcatcttctgcggcggcgaggcgctcgcgcgcgaactggcgaatcagttgttggaaaagtgcgccgagctttggaacctctacggcccgacggagacgaccatctggtcggcgattcatcgagtcgagacgacggaaggggccgtgtccgtcggtcgcccgatagccaacacgcgggtctacgtgctcgacaagaatctgcgccccgtgcccgccggagtcccgggcgaactgctcatcggcggcgacggattagcccgggggtatctgaatcgccccgacctgacggccgagaagttcgtgcccgacccgttcggcgatgcccccggcgcgcggctctaccgcacgggcgacctcgcgcgttactcgcccggcggagagcttgagattcttaaccgcgttgacacgcaggtgaagattcgcggcttccgcatcgagccgggtgagatcgagggcgtgctcgaacagcacccggcgattcgtcaggcggtcgtcgtcgcccgcgacgacggcgagggcgagaagcgtctcgtcggttacgtggtcgcgcgcccggagtcggctttgaacgttaacgagctgcgccgctacctgctcgggacgctgccggagtacatggtgccttcggccttcgtcatgctcgacgagttgccgctgacgccgaacggcaagatcgaccgtgaggcgttgccgcaaccggatgcggccgc

SEQ ID NO: 148 - protein, 969 aa, Artificial Sequence
  Description of Artificial Sequence: Synthetic polypeptide
SRTTDAVSTIPLADRQQPLALSFAQERQWFLWQLEPESAAYHIPSALRLRGRLDVDALQRSFDSLVARHETLRTRFRLEGGRSYQQVQPAVSVSIEREQFGEEGLIERIQAIVVQPFDLERGPLLRVNLLQLAEDDHVLVLVQHHIVSDGWSMQVMVEELVQLYAAYSQGLDVVLPALPIQYADYALWQRSWMEAGEKERQLAYWTGLLGGEQPVLELPFDRPRPARQSHRGAQLGFELSRELVEAVRALAQREGASSFMLLLASFQALLYRYSGQADIRVGVPIANRNRVETERLIGFFVNTQVLKADLDGRMGFDELLAQARQRALEAQAHQDLPFEQLVEALQPERNASHNPLFQVLFNHQSEIRSVTPEVQLEDLRLEGLAWDGQTAQFDLTLDIQEDENGIWASFDYATDLFDASTVERLAGHWRNLLRGIVANPRQRLGELPLLDGAESRRMLVEWNDTREAYAADRRVHELFEAQAARTPDASAVESQGRALSYAELNRRANQLARHLRRMGVGPEVLVGICVEKSVEMLVGLLGILKAGGAYVPLDPAFPAERLAFMAEDAELPVLLTESRLTAVVPPNPTRRTVLLDSDWELIAGESGDDLSDTGGGENTAYVIYTSGSTGRPKGVQVSHRALVNFLHSMRGRPGIEAGDTLLAVTTLSFDIAGLELYLPLLTGARVVVAGREELSDGALLSERISRSGATVMQATPATWRLLLGAGWRGKSDLRIFCGGEALARELANQLLEKCAELWNLYGPTETTIWSAIHRVETTEGAVSVGRPIANTRVYVLDKNLRPVPAGVPGELLIGGDGLARGYLNRPDLTAEKFVPDPFGDAPGARLYRTGDLARYSPGGELEILNRVDTQVKIRGFRIEPGEIEGVLEQHPAIRQAVVVARDDGEGEKRLVGYVVARPESALNVNELRRYLLGTLPEYMVPSAFVMLDELPLTPNGKIDREALPQPDAA

SEQ ID NO: 149 - DNA, 2909 bp, Artificial Sequence
  Description of Artificial Sequence: Synthetic polynucleotide
tctagaacgacggatgcggtctcgacgataccgcttgccgatcggcagcaaccgttggcactgtccttcgctcaggagcgtcagtggttcctctggcaactggagccggaaagcgcggcctaccatattccgagtgccttgcgcctacgcgggcggctggacgtggatgccttgcaacgcagcttcgacagcctggtcgcgcggcatgaaaccttgcgtacccgcttccggctggagggagggcgttcgtaccagcaggtacaacctgcggttagcgtttccatcgagcgggaacagttcggtgaagaaggcctgatcgaacggatacaggccatcgttgtgcagccattcgacctggaacgggggccgctgctgcgggtgaacctgttgcaactggccgaggacgaccatgtactggtgctggtccagcaccacatcgtgtccgatggttggtcgatgcaggtgatggtcgaggaactggtccagctctatgccgcctatagccaagggctcgacgtggtgttgccagccctgccgatccagtacgcggactacgccctgtggcagcgcagctggatggaggcgggggaaaaggagcgccagttggcgtactggaccggcctgctgggcggcgagcagccggtgctggagttgccgttcgatcggccgcgtccggcccggcagagccatcgtggcgcgcagttgggtttcgagctatcgcgggaactggtcgaggccgtgagagccttggcccagcgtgaaggcgccagtagtttcatgctgttgctggcctcgttccaggcgctgttgtatcgctacagcgggcaggcggatatccgtgtcggtgtgccgatcgccaatcgcaaccgcgtggagaccgagcggctgatcggcttcttcgtcaacacccaggtgctcaaggccgacctggacggtcggatgggcttcgacgagctgctggcccaggcccgccaacgcgcgctggaggcccaggcgcaccaggacctgccgttcgagcaactggtggaagccttgcagccggagcgcaatgccagccacaacccactgttccaggtgctgttcaaccatcagagcgagatacgctcggtgacgcccgaggttcagttggaggacctgcgtctggaaggcctggcctgggacggccagactgcgcagttcgacctgacgctggatattcaggaagacgaaaacggcatctgggcctccttcgactatgccaccgatctgttcgacgcctccaccgtggaacgcctggccggccattggcgcaacctgttgcgcggcatcgtcgccaacccacgacagcggctcggcgagttgccgctgctggatgcgccggagtcccgacggatgctcgtcgagtggaacgacacgcgggaagcgtacgccgccgaccggcgcgtccacgaactattcgaggctcaggcggcgcggacgccggacgcgtcggcggtcgagtcgcaagggcgcgcgctgagttatgccgagctgaatagacgggccaatcaactggcccgccatctgcgacgcatgggcgtcgggccggaagtgctggtcggcatctgcgtcgagaagagcgtcgagatgctggtcgggcttttgggcatactcaaagccgggggggcgtatgtcccgctcgacccggcgttcccggccgagcggctcgccttcatggcggaagacgcggaactgcccgtcctgctgaccgaatcaagactgacggcagtcgtccccccgaaccccacgcgccgtaccgtccttctcgattcggattgggaactcatcgcgggcgagagtggggacgacctgtccgacaccggcggcggcgagaatacggcttacgtgatctacacctcgggctcgaccggcagaccgaagggcgtacaggtttcacaccgcgcgttggttaatttcctgcactcgatgcgcgggcggcccgggatcgaagcaggcgacacgctgctcgccgtcaccaccctctccttcgacatcgccgggctggagctttacctgccgctcttgacgggcgcgcgcgtcgtcgtcgccggccgggaagaactctcagacggagccttgttgtcggagaggataagccgctcgggcgcgaccgtgatgcaggcgaccccggccacctggcgtctgctgctcggggcgggatggcggggcaagagcgatctgcgcatcttctgcggcggcgaggcgctcgcgcgcgaactggcgaatcagttgttggaaaagtgcgccgagctttggaacctctacggcccgacggagacgaccatctggtcggcgattcatcgagtcgagacgacggaaggggccgtgtccgtcggtcgcccgatagccaacacgcgggtctacgtgctcgacaagaatctgcgccccgtgcccgccggagtcccgggcgaactgctcatcggcggcgacggattagcccgggggtatctgaatcgccccgacctgacggccgagaagttcgtgcccgacccgttcggcgatgcccccggcgcgcggctctaccgcacgggcgacctcgcgcgttactcgcccggcggagagcttgagattcttaaccgcgttgacacgcaggtgaagattcgcggcttccgcatcgagccgggtgagatcgagggcgtgctcgaacagcacccggcgattcgtcaggcggtcgtcgtcgcccgcgacgacggcgagggcgagaagcgtctcgtcggttacgtggtcgcgcgcccggagtcggctttgaacgttaacgagctgcgccgctacctgctcgggacgctgccggagtacatggtgccttcggccttcgtcatgctcgacgagttgccgctgacgccgaacggcaagatcgaccgtgaggcgttgccgcaaccggatgcggccgc

SEQ ID NO: 150 - protein, 969 aa, Artificial Sequence
  Description of Artificial Sequence: Synthetic polypeptide
SRTTDAVSTIPLADRQQPLALSFAQERQWFLWQLEPESAAYHIPSALRLRGRLDVDALQRSFDSLVARHETLRTRFRLEGGRSYQQVQPAVSVSIEREQFGEEGLIERIQAIVVQPFDLERGPLLRVNLLQLAEDDHVLVLVQHHIVSDGWSMQVMVEELVQLYAAYSQGLDVVLPALPIQYADYALWQRSWMEAGEKERQLAYWTGLLGGEQPVLELPFDRPRPARQSHRGAQLGFELSRELVEAVRALAQREGASSFMLLLASFQALLYRYSGQADIRVGVPIANRNRVETERLIGFFVNTQVLKADLDGRMGFDELLAQARQRALEAQAHQDLPFEQLVEALQPERNASHNPLFQVLFNHQSEIRSVTPEVQLEDLRLEGLAWDGQTAQFDLTLDIQEDENGIWASFDYATDLFDASTVERLAGHWRNLLRGIVANPRQRLGELPLLDAPESRRMLVEWNDTREAYAADRRVHELFEAQAARTPDASAVESQGRALSYAELNRRANQLARHLRRMGVGPEVLVGICVEKSVEMLVGLLGILKAGGAYVPLDPAFPAERLAFMAEDAELPVLLTESRLTAVVPPNPTRRTVLLDSDWELIAGESGDDLSDTGGGENTAYVIYTSGSTGRPKGVQVSHRALVNFLHSMRGRPGIEAGDTLLAVTTLSFDIAGLELYLPLLTGARVVVAGREELSDGALLSERISRSGATVMQATPATWRLLLGAGWRGKSDLRIFCGGEALARELANQLLEKCAELWNLYGPTETTIWSAIHRVETTEGAVSVGRPIANTRVYVLDKNLRPVPAGVPGELLIGGDGLARGYLNRPDLTAEKFVPDPFGDAPGARLYRTGDLARYSPGGELEILNRVDTQVKIRGFRIEPGEIEGVLEQHPAIRQAVVVARDDGEGEKRLVGYVVARPESALNVNELRRYLLGTLPEYMVPSAFVMLDELPLTPNGKIDREALPQPDAA

SEQ ID NO: 151 - DNA, 2909 bp, Artificial Sequence
  Description of Artificial Sequence: Synthetic polynucleotide
tctagaacgacggatgcggtctcgacgataccgcttgccgatcggcagcaaccgttggcactgtccttcgctcaggagcgtcagtggttcctctggcaactggagccggaaagcgcggcctaccatattccgagtgccttgcgcctacgcgggcggctggacgtggatgccttgcaacgcagcttcgacagcctggtcgcgcggcatgaaaccttgcgtacccgcttccggctggagggagggcgttcgtaccagcaggtacaacctgcggttagcgtttccatcgagcgggaacagttcggtgaagaaggcctgatcgaacggatacaggccatcgttgtgcagccattcgacctggaacgggggccgctgctgcgggtgaacctgttgcaactggccgaggacgaccatgtactggtgctggtccagcaccacatcgtgtccgatggttggtcgatgcaggtgatggtcgaggaactggtccagctctatgccgcctatagccaagggctcgacgtggtgttgccagccctgccgatccagtacgcggactacgccctgtggcagcgcagctggatggaggcgggggaaaaggagcgccagttggcgtactggaccggcctgctgggcggcgagcagccggtgctggagttgccgttcgatcggccgcgtccggcccggcagagccatcgtggcgcgcagttgggtttcgagctatcgcgggaactggtcgaggccgtgagagccttggcccagcgtgaaggcgccagtagtttcatgctgttgctggcctcgttccaggcgctgttgtatcgctacagcgggcaggcggatatccgtgtcggtgtgccgatcgccaatcgcaaccgcgtggagaccgagcggctgatcggcttcttcgtcaacacccaggtgctcaaggccgacctggacggtcggatgggcttcgacgagctgctggcccaggcccgccaacgcgcgctggaggcccaggcgcaccaggacctgccgttcgagcaactggtggaagccttgcagccggagcgcaatgccagccacaacccactgttccaggtgctgttcaaccatcagagcgagatacgctcggtgacgcccgaggttcagttggaggacctgcgtctggaaggcctggcctgggacggccagactgcgcagttcgacctgacgctggatattcaggaagacgaaaacggcatctgggcctccttcgactatgccaccgatctgttcgacgcctccaccgtggaacgcctggccggccattggcgcaacctgttgcgcggcatcgtcgccaacccacgacagcggctcggcgagttgccgctgctggatgcgccggagcgccggcagaccctctccgaatggaacgacacgcgggaagcgtacgccgccgaccggcgcgtccacgaactattcgaggctcaggcggcgcggacgccggacgcgtcggcggtcgagtcgcaagggcgcgcgctgagttatgccgagctgaatagacgggccaatcaactggcccgccatctgcgacgcatgggcgtcgggccggaagtgctggtcggcatctgcgtcgagaagagcgtcgagatgctggtcgggcttttgggcatactcaaagccgggggggcgtatgtcccgctcgacccggcgttcccggccgagcggctcgccttcatggcggaagacgcggaactgcccgtcctgctgaccgaatcaagactgacggcagtcgtccccccgaaccccacgcgccgtaccgtccttctcgattcggattgggaactcatcgcgggcgagagtggggacgacctgtccgacaccggcggcggcgagaatacggcttacgtgatctacacctcgggctcgaccggcagaccgaagggcgtacaggtttcacaccgcgcgttggttaatttcctgcactcgatgcgcgggcggcccgggatcgaagcaggcgacacgctgctcgccgtcaccaccctctccttcgacatcgccgggctggagctttacctgccgctcttgacgggcgcgcgcgtcgtcgtcgccggccgggaagaactctcagacggagccttgttgtcggagaggataagccgctcgggcgcgaccgtgatgcaggcgaccccggccacctggcgtctgctgctcggggcgggatggcggggcaagagcgatctgcgcatcttctgcggcggcgaggcgctcgcgcgcgaactggcgaatcagttgttggaaaagtgcgccgagctttggaacctctacggcccgacggagacgaccatctggtcggcgattcatcgagtcgagacgacggaaggggccgtgtccgtcggtcgcccgatagccaacacgcgggtctacgtgctcgacaagaatctgcgccccgtgcccgccggagtcccgggcgaactgctcatcggcggcgacggattagcccgggggtatctgaatcgccccgacctgacggccgagaagttcgtgcccgacccgttcggcgatgcccccggcgcgcggctctaccgcacgggcgacctcgcgcgttactcgcccggcggagagcttgagattcttaaccgcgttgacacgcaggtgaagattcgcggcttccgcatcgagccgggtgagatcgagggcgtgctcgaacagcacccggcgattcgtcaggcggtcgtcgtcgcccgcgacgacggcgagggcgagaagcgtctcgtcggttacgtggtcgcgcgcccggagtcggctttgaacgttaacgagctgcgccgctacctgctcgggacgctgccggagtacatggtgccttcggccttcgtcatgctcgacgagttgccgctgacgccgaacggcaagatcgaccgtgaggcgttgccgcaaccggatgcggccgc

SEQ ID NO: 152 - protein, 969 aa, Artificial Sequence
  Description of Artificial Sequence: Synthetic polypeptide
SRTTDAVSTIPLADRQQPLALSFAQERQWFLWQLEPESAAYHIPSALRLRGRLDVDALQRSFDSLVARHETLRTRFRLEGGRSYQQVQPAVSVSIEREQFGEEGLIERIQAIVVQPFDLERGPLLRVNLLQLAEDDHVLVLVQHHIVSDGWSMQVMVEELVQLYAAYSQGLDVVLPALPIQYADYALWQRSWMEAGEKERQLAYWTGLLGGEQPVLELPFDRPRPARQSHRGAQLGFELSRELVEAVRALAQREGASSFMLLLASFQALLYRYSGQADIRVGVPIANRNRVETERLIGFFVNTQVLKADLDGRMGFDELLAQARQRALEAQAHQDLPFEQLVEALQPERNASHNPLFQVLFNHQSEIRSVTPEVQLEDLRLEGLAWDGQTAQFDLTLDIQEDENGIWASFDYATDLFDASTVERLAGHWRNLLRGIVANPRQRLGELPLLDAPERRQTLSEWNDTREAYAADRRVHELFEAQAARTPDASAVESQGRALSYAELNRRANQLARHLRRMGVGPEVLVGICVEKSVEMLVGLLGILKAGGAYVPLDPAFPAERLAFMAEDAELPVLLTESRLTAVVPPNPTRRTVLLDSDWELIAGESGDDLSDTGGGENTAYVIYTSGSTGRPKGVQVSHRALVNFLHSMRGRPGIEAGDTLLAVTTLSFDIAGLELYLPLLTGARVVVAGREELSDGALLSERISRSGATVMQATPATWRLLLGAGWRGKSDLRIFCGGEALARELANQLLEKCAELWNLYGPTETTIWSAIHRVETTEGAVSVGRPIANTRVYVLDKNLRPVPAGVPGELLIGGDGLARGYLNRPDLTAEKFVPDPFGDAPGARLYRTGDLARYSPGGELEILNRVDTQVKIRGFRIEPGEIEGVLEQHPAIRQAVVVARDDGEGEKRLVGYVVARPESALNVNELRRYLLGTLPEYMVPSAFVMLDELPLTPNGKIDREALPQPDAA

SEQ ID NO: 153 - DNA, 2720 bp, Artificial Sequence
  Description of Artificial Sequence: Synthetic polynucleotide
tctagaacgacggatgcggtctcgacgataccgcttgccgatcggcagcaaccgttggcactgtccttcgctcagggccggctgtggttcctcgatcaactggaaccgaatagccccttttacaacaacccggtggcggtgcggctgaaaggccagttagatatcgcgcgcctggaggaagcgttgaatgcgctgatccagcggcacgaggcgctgcgcacgcgctttgtggcggtggacggcaagcccgtggcggtggtggacgcggaattgcggctgaagctctcggtcgaaccggctgtggacgtggagcaacaggcgcgcgcggaggccctggagccattcgacctggccacggggccgctgattcgggcgcggctgcttcaggtgaacgccgcggagcacatcgcgctggtgacgctgcaccacatcatctcggacggctggtcgacaggcgtgctggtgcgggagttgagtgcgctctatgcggggcgggagttggcgccgctcgccatccagtacggggacttcgcggcgtggcagcgggagtggctctcgggcgaagtcttggaagcgcagctcaactactggcgggagcagttgcaggacgcgccgccggtgctggagttggcgacggaccgggcgcggcctgcggtgcagagtttccgtggatcccactaccggttccaggtgccttccgaggtagccggggaactcgccgagttgagccggcgggaaggcgtgacgctgttcatggtgctgctggcggcctaccaggttttgctgagccggtatgcgggcgggcaggaagacgtggtggtgggcacgcccatcgcgaaccggcagcgcaccgaggtggaagggctgatcgggttcttcgtgaacacgctggtgctgcgcacgaagctggcaggggaaccgagcgtaagagagctgctggggcgggtgcgggagacctgcctgggcgcctacgcgcaccaggacctgccgtttgaaacgctggtggagaccttgcagccggagcggaagctgagccatgcgccgctgttccagacgatgctggtgtgggcgaacgcgccggcggagcggttggaattgggcgggctcgaggtggaggcggtggaggccgaaagcgggacggcgcggttcgacctgacgctggagatgggagaaggcgcgggcggggagctgtggggatcgctcgagtacgcctcggacctgtgggatgaatcgacggtggcgcggatggcggggcacttctgcgagctgctggggcagatggcggggaaggtggagcggccggtcacggaactggaactggcggtgccggagcaggcgcagtggaacgcgacggaggcggagtatccgcggggagtgacgattcacgcgctggtggaggagcaggcggcgcgggatccggagcgggcggcgctgcggttcgaagggcaggcgctgagctatggggagctggtggcgcgggtcaaagagacgtcccgcgagatggggccgcggcaactggtggcgatcagcctggagcggggcttcgcacaggtagtggcgcagttggcggcgctggaggcgggcggggcatacgtgccggtggacccgagctatccggaggagcggcgggagtacatgctggcggactccggggccggggtggtggtgaacggggaagggatcgttaagcgcgaggccgggcgggaggtggacgggctggcgtacatgatctacacgtcggggtcgacggggcgtccgaaagggacgatgctgcggcacgaagggctgtgcaacctggcgcggtggcagcagcgggcgttcgggatcacgcgggagagccgggtattgcagtttgcgccgtcgagtttcgatgcctcggtgtgggagacgttcatggcgctggcgaacggagcgacgctggtgctggggcggcaggaagtattgaggcagatggaggcgctgcacaagctgttggtggaggagaagattacgcacgtgacgctgccgccgacggtgttggaggcattggaggcggagggcttaccggatttgcaggtggtgatcgcggcgggcgaggcgtgcgggcgggaactggtggagaagtgggggcgggggcggcggttcttcaacgcgtacgggccgacggagacgacggtgtgcgcgtcggcatatgagtgcaaggtgggcgaacgggtagcgccggccatcgggcggccgattgcgaacatgcagatgtgggtgctggacgagtggggacggccggcgccggtaggcgtgagtggggagttgcacatcgggggcgtgggcctggcggcagggtactgggagcggccggagctgacggcggagaagtttgtcgagacggcgtacgggcgggtgtacaagagcggggacgtggggcgatggcggggcgacggggtggtggagtacgtggggcggcgggacacgcaggtgaagctgcgggggtaccggatcgagttgggggaggtggaggaagcgctgcggagctgcgcgggggtacgcgcggcgggggtgggagtggacggggaccggctggtggggtatgtggtcggcggggacatagccgaggtgcggcgggagctgcgggggcggctgccggagtacatggtgccgggggtggtgatggcattggaggagatgccgttgctgccgaacggcaagatcgaccggcaggcgttgccgcaaccggatgcggccgc

SEQ ID NO: 154 - protein, 906 aa, Artificial Sequence
  Description of Artificial Sequence: Synthetic polypeptide
SRTTDAVSTIPLADRQQPLALSFAQGRLWFLDQLEPNSPFYNNPVAVRLKGQLDIARLEEALNALIQRHEALRTRFVAVDGKPVAVVDAELRLKLSVEPAVDVEQQARAEALEPFDLATGPLIRARLLQVNAAEHIALVTLHHIISDGWSTGVLVRELSALYAGRELAPLAIQYGDFAAWQREWLSGEVLEAQLNYWREQLQDAPPVLELATDRARPAVQSFRGSHYRFQVPSEVAGELAELSRREGVTLFMVLLAAYQVLLSRYAGGQEDVVVGTPIANRQRTEVEGLIGFFVNTLVLRTKLAGEPSVRELLGRVRETCLGAYAHQDLPFETLVETLQPERKLSHAPLFQTMLVWANAPAERLELGGLEVEAVEAESGTARFDLTLEMGEGAGGELWGSLEYASDLWDESTVARMAGHFCELLGQMAGKVERPVTELELAVPEQAQWNATEAEYPRGVTIHALVEEQAARDPERAALRFEGQALSYGELVARVKETSREMGPRQLVAISLERGFAQVVAQLAALEAGGAYVPVDPSYPEERREYMLADSGAGVVVNGEGIVKREAGREVDGLAYMIYTSGSTGRPKGTMLRHEGLCNLARWQQRAFGITRESRVLQFAPSSFDASVWETFMALANGATLVLGRQEVLRQMEALHKLLVEEKITHVTLPPTVLEALEAEGLPDLQVVIAAGEACGRELVEKWGRGRRFFNAYGPTETTVCASAYECKVGERVAPAIGRPIANMQMWVLDEWGRPAPVGVSGELHIGGVGLAAGYWERPELTAEKFVETAYGRVYKSGDVGRWRGDGVVEYVGRRDTQVKLRGYRIELGEVEEALRSCAGVRAAGVGVDGDRLVGYVVGGDIAEVRRELRGRLPEYMVPGVVMALEEMPLLPNGKIDRQALPQPDAA

SEQ ID NO: 155 - DNA, 2747 bp, Artificial Sequence
  Description of Artificial Sequence: Synthetic polynucleotide
tctagaacgacggatgcggtctcgacgataccgcttgccgatcggcagcaaccgttggcactgtccttcgctcaggagcgtcagtggttcctctggcaactggagccggaaagcgcggcctaccatattccgagtgccttgcgcctacgcgggcggctggacgtggatgccttgcaacgcagcttcgacagcctggtcgcgcggcatgaaaccttgcgtacccgcttccggctggagggagggcgttcgtaccagcaggtacaacctgcggttagcgtttccatcgagcgggaacagttcggtgaagaaggcctgatcgaacggatacaggccatcgttgtgcagccattcgacctggaacgggggccgctgctgcgggtgaacctgttgcaactggccgaggacgaccatgtactggtgctggtccagcaccacatcgtgtccgatggttggtcgatgcaggtgatggtcgaggaactggtccagctctatgccgcctatagccaagggctcgacgtggtgttgccagccctgccgatccagtacgcggactacgccctgtggcagcgcagctggatggaggcgggggaaaaggagcgccagttggcgtactggaccggcctgctgggcggcgagcagccggtgctggagttgccgttcgatcggccgcgtccggcccggcagagccatcgtggcgcgcagttgggtttcgagctatcgcgggaactggtcgaggccgtgagagccttggcccagcgtgaaggcgccagtagtttcatgctgttgctggcctcgttccaggcgctgttgtatcgctacagcgggcaggcggatatccgtgtcggtgtgccgatcgccaatcgcaaccgcgtggagaccgagcggctgatcggcttcttcgtcaacacccaggtgctcaaggccgacctggacggtcggatgggcttcgacgagctgctggcccaggcccgccaacgcgcgctggaggcccaggcgcaccaggacctgccgttcgagcaactggtggaagccttgcagccggagcgcaatgccagccacaacccactgttccaggtgctgttcaaccatcagagcgagatacgctcggtgacgcccgaggttcagttggaggacctgcgtctggaaggcctggcctgggacggccagactgcgcagttcgacctgacgctggatattcaggaagacgaaaacggcatctgggcctccttcgactatgccaccgatctgttcgacgcctccaccgtggaacgcctggccggccacttctgcgagctgctggggcagatggcggggaaggtggagcggccggtcacggaactggaactggcggtgccggagcaggcgcagtggaacgcgacggaggcggagtatccgcggggagtgacgattcacgcgctggtggaggagcaggcggcgcgggatccggagcgggcggcgctgcggttcgaagggcaggcgctgagctatggggagctggtggcgcgggtcaaagagacgtcccgcgagatggggccgcggcaactggtggcgatcagcctggagcggggcttcgcacaggtagtggcgcagttggcggcgctggaggcgggcggggcatacgtgccggtggacccgagctatccggaggagcggcgggagtacatgctggcggactccggggccggggtggtggtgaacggggaagggatcgttaagcgcgaggccgggcgggaggtggacgggctggcgtacatgatctacacgtcggggtcgacggggcgtccgaaagggacgatgctgcggcacgaagggctgtgcaacctggcgcggtggcagcagcgggcgttcgggatcacgcgggagagccgggtattgcagtttgcgccgtcgagtttcgatgcctcggtgtgggagacgttcatggcgctggcgaacggagcgacgctggtgctggggcggcaggaagtattgaggcagatggaggcgctgcacaagctgttggtggaggagaagattacgcacgtgacgctgccgccgacggtgttggaggcattggaggcggagggcttaccggatttgcaggtggtgatcgcggcgggcgaggcgtgcgggcgggaactggtggagaagtgggggcgggggcggcggttcttcaacgcgtacgggccgacggagacgacggtgtgcgcgtcggcatatgagtgcaaggtgggcgaacgggtagcgccggccatcgggcggccgattgcgaacatgcagatgtgggtgctggacgagtggggacggccggcgccggtaggcgtgagtggggagttgcacatcgggggcgtgggcctggcggcagggtactgggagcggccggagctgacggcggagaagtttgtcgagacggcgtacgggcgggtgtacaagagcggggacgtggggcgatggcggggcgacggggtggtggagtacgtggggcggcgggacacgcaggtgaagctgcgggggtaccggatcgagttgggggaggtggaggaagcgctgcggagctgcgcgggggtacgcgcggcgggggtgggagtggacggggaccggctggtggggtatgtggtcggcggggacatagccgaggtgcggcgggagctgcgggggcggctgccggagtacatggtgccgggggtggtgatggcattggaggagatgccgttgctgccgaacggcaagatcgaccggcaggcgttgccgcaaccggatgcggccgc

SEQ ID NO: 156 - protein, 915 aa, Artificial Sequence
  Description of Artificial Sequence: Synthetic polypeptide
SRTTDAVSTIPLADRQQPLALSFAQERQWFLWQLEPESAAYHIPSALRLRGRLDVDALQRSFDSLVARHETLRTRFRLEGGRSYQQVQPAVSVSIEREQFGEEGLIERIQAIVVQPFDLERGPLLRVNLLQLAEDDHVLVLVQHHIVSDGWSMQVMVEELVQLYAAYSQGLDVVLPALPIQYADYALWQRSWMEAGEKERQLAYWTGLLGGEQPVLELPFDRPRPARQSHRGAQLGFELSRELVEAVRALAQREGASSFMLLLASFQALLYRYSGQADIRVGVPIANRNRVETERLIGFFVNTQVLKADLDGRMGFDELLAQARQRALEAQAHQDLPFEQLVEALQPERNASHNPLFQVLFNHQSEIRSVTPEVQLEDLRLEGLAWDGQTAQFDLTLDIQEDENGIWASFDYATDLFDASTVERLAGHFCELLGQMAGKVERPVTELELAVPEQAQWNATEAEYPRGVTIHALVEEQAARDPERAALRFEGQALSYGELVARVKETSREMGPRQLVAISLERGFAQVVAQLAALEAGGAYVPVDPSYPEERREYMLADSGAGVVVNGEGIVKREAGREVDGLAYMIYTSGSTGRPKGTMLRHEGLCNLARWQQRAFGITRESRVLQFAPSSFDASVWETFMALANGATLVLGRQEVLRQMEALHKLLVEEKITHVTLPPTVLEALEAEGLPDLQVVIAAGEACGRELVEKWGRGRRFFNAYGPTETTVCASAYECKVGERVAPAIGRPIANMQMWVLDEWGRPAPVGVSGELHIGGVGLAAGYWERPELTAEKFVETAYGRVYKSGDVGRWRGDGVVEYVGRRDTQVKLRGYRIELGEVEEALRSCAGVRAAGVGVDGDRLVGYVVGGDIAEVRRELRGRLPEYMVPGVVMALEEMPLLPNGKIDRQALPQPDAA

SEQ ID NO: 157 - DNA, 2747 bp, Artificial Sequence
  Description of Artificial Sequence: Synthetic polynucleotide
tctagaacgacggatgcggtctcgacgataccgcttgccgatcggcagcaaccgttggcactgtccttcgctcaggagcgtcagtggttcctctggcaactggagccggaaagcgcggcctaccatattccgagtgccttgcgcctacgcgggcggctggacgtggatgccttgcaacgcagcttcgacagcctggtcgcgcggcatgaaaccttgcgtacccgcttccggctggagggagggcgttcgtaccagcaggtacaacctgcggttagcgtttccatcgagcgggaacagttcggtgaagaaggcctgatcgaacggatacaggccatcgttgtgcagccattcgacctggaacgggggccgctgctgcgggtgaacctgttgcaactggccgaggacgaccatgtactggtgctggtccagcaccacatcgtgtccgatggttggtcgatgcaggtgatggtcgaggaactggtccagctctatgccgcctatagccaagggctcgacgtggtgttgccagccctgccgatccagtacgcggactacgccctgtggcagcgcagctggatggaggcgggggaaaaggagcgccagttggcgtactggaccggcctgctgggcggcgagcagccggtgctggagttgccgttcgatcggccgcgtccggcccggcagagccatcgtggcgcgcagttgggtttcgagctatcgcgggaactggtcgaggccgtgagagccttggcccagcgtgaaggcgccagtagtttcatgctgttgctggcctcgttccaggcgctgttgtatcgctacagcgggcaggcggatatccgtgtcggtgtgccgatcgccaatcgcaaccgcgtggagaccgagcggctgatcggcttcttcgtcaacacccaggtgctcaaggccgacctggacggtcggatgggcttcgacgagctgctggcccaggcccgccaacgcgcgctggaggcccaggcgcaccaggacctgccgttcgagcaactggtggaagccttgcagccggagcgcaatgccagccacaacccactgttccaggtgctgttcaaccatcagagcgagatacgctcggtgacgcccgaggttcagttggaggacctgcgtctggaaggcctggcctgggacggccagactgcgcagttcgacctgacgctggatattcaggaagacgaaaacggcatctgggcctccttcgactatgccaccgatctgttcgacgcctccaccgtggaacgcctggccggccattggcgcaacctgttgcgcggcatcgtcgccaaggtggagcggccggtcacggaactggaactggcggtgccggagcaggcgcagtggaacgcgacggaggcggagtatccgcggggagtgacgattcacgcgctggtggaggagcaggcggcgcgggatccggagcgggcggcgctgcggttcgaagggcaggcgctgagctatggggagctggtggcgcgggtcaaagagacgtcccgcgagatggggccgcggcaactggtggcgatcagcctggagcggggcttcgcacaggtagtggcgcagttggcggcgctggaggcgggcggggcatacgtgccggtggacccgagctatccggaggagcggcgggagtacatgctggcggactccggggccggggtggtggtgaacggggaagggatcgttaagcgcgaggccgggcgggaggtggacgggctggcgtacatgatctacacgtcggggtcgacggggcgtccgaaagggacgatgctgcggcacgaagggctgtgcaacctggcgcggtggcagcagcgggcgttcgggatcacgcgggagagccgggtattgcagtttgcgccgtcgagtttcgatgcctcggtgtgggagacgttcatggcgctggcgaacggagcgacgctggtgctggggcggcaggaagtattgaggcagatggaggcgctgcacaagctgttggtggaggagaagattacgcacgtgacgctgccgccgacggtgttggaggcattggaggcggagggcttaccggatttgcaggtggtgatcgcggcgggcgaggcgtgcgggcgggaactggtggagaagtgggggcgggggcggcggttcttcaacgcgtacgggccgacggagacgacggtgtgcgcgtcggcatatgagtgcaaggtgggcgaacgggtagcgccggccatcgggcggccgattgcgaacatgcagatgtgggtgctggacgagtggggacggccggcgccggtaggcgtgagtggggagttgcacatcgggggcgtgggcctggcggcagggtactgggagcggccggagctgacggcggagaagtttgtcgagacggcgtacgggcgggtgtacaagagcggggacgtggggcgatggcggggcgacggggtggtggagtacgtggggcggcgggacacgcaggtgaagctgcgggggtaccggatcgagttgggggaggtggaggaagcgctgcggagctgcgcgggggtacgcgcggcgggggtgggagtggacggggaccggctggtggggtatgtggtcggcggggacatagccgaggtgcggcgggagctgcgggggcggctgccggagtacatggtgccgggggtggtgatggcattggaggagatgccgttgctgccgaacggcaagatcgaccggcaggcgttgccgcaaccggatgcggccgc

SEQ ID NO: 158 - protein, 915 aa, Artificial Sequence
  Description of Artificial Sequence: Synthetic polypeptide
SRTTDAVSTIPLADRQQPLALSFAQERQWFLWQLEPESAAYHIPSALRLRGRLDVDALQRSFDSLVARHETLRTRFRLEGGRSYQQVQPAVSVSIEREQFGEEGLIERIQAIVVQPFDLERGPLLRVNLLQLAEDDHVLVLVQHHIVSDGWSMQVMVEELVQLYAAYSQGLDVVLPALPIQYADYALWQRSWMEAGEKERQLAYWTGLLGGEQPVLELPFDRPRPARQSHRGAQLGFELSRELVEAVRALAQREGASSFMLLLASFQALLYRYSGQADIRVGVPIANRNRVETERLIGFFVNTQVLKADLDGRMGFDELLAQARQRALEAQAHQDLPFEQLVEALQPERNASHNPLFQVLFNHQSEIRSVTPEVQLEDLRLEGLAWDGQTAQFDLTLDIQEDENGIWASFDYATDLFDASTVERLAGHWRNLLRGIVAKVERPVTELELAVPEQAQWNATEAEYPRGVTIHALVEEQAARDPERAALRFEGQALSYGELVARVKETSREMGPRQLVAISLERGFAQVVAQLAALEAGGAYVPVDPSYPEERREYMLADSGAGVVVNGEGIVKREAGREVDGLAYMIYTSGSTGRPKGTMLRHEGLCNLARWQQRAFGITRESRVLQFAPSSFDASVWETFMALANGATLVLGRQEVLRQMEALHKLLVEEKITHVTLPPTVLEALEAEGLPDLQVVIAAGEACGRELVEKWGRGRRFFNAYGPTETTVCASAYECKVGERVAPAIGRPIANMQMWVLDEWGRPAPVGVSGELHIGGVGLAAGYWERPELTAEKFVETAYGRVYKSGDVGRWRGDGVVEYVGRRDTQVKLRGYRIELGEVEEALRSCAGVRAAGVGVDGDRLVGYVVGGDIAEVRRELRGRLPEYMVPGVVMALEEMPLLPNGKIDRQALPQPDAA

SEQ ID NO: 159 - DNA, 2750 bp, Artificial Sequence
  Description of Artificial Sequence: Synthetic polynucleotide
tctagaacgacggatgcggtctcgacgataccgcttgccgatcggcagcaaccgttggcactgtccttcgctcaggagcgtcagtggttcctctggcaactggagccggaaagcgcggcctaccatattccgagtgccttgcgcctacgcgggcggctggacgtggatgccttgcaacgcagcttcgacagcctggtcgcgcggcatgaaaccttgcgtacccgcttccggctggagggagggcgttcgtaccagcaggtacaacctgcggttagcgtttccatcgagcgggaacagttcggtgaagaaggcctgatcgaacggatacaggccatcgttgtgcagccattcgacctggaacgggggccgctgctgcgggtgaacctgttgcaactggccgaggacgaccatgtactggtgctggtccagcaccacatcgtgtccgatggttggtcgatgcaggtgatggtcgaggaactggtccagctctatgccgcctatagccaagggctcgacgtggtgttgccagccctgccgatccagtacgcggactacgccctgtggcagcgcagctggatggaggcgggggaaaaggagcgccagttggcgtactggaccggcctgctgggcggcgagcagccggtgctggagttgccgttcgatcggccgcgtccggcccggcagagccatcgtggcgcgcagttgggtttcgagctatcgcgggaactggtcgaggccgtgagagccttggcccagcgtgaaggcgccagtagtttcatgctgttgctggcctcgttccaggcgctgttgtatcgctacagcgggcaggcggatatccgtgtcggtgtgccgatcgccaatcgcaaccgcgtggagaccgagcggctgatcggcttcttcgtcaacacccaggtgctcaaggccgacctggacggtcggatgggcttcgacgagctgctggcccaggcccgccaacgcgcgctggaggcccaggcgcaccaggacctgccgttcgagcaactggtggaagccttgcagccggagcgcaatgccagccacaacccactgttccaggtgctgttcaaccatcagagcgagatacgctcggtgacgcccgaggttcagttggaggacctgcgtctggaaggcctggcctgggacggccagactgcgcagttcgacctgacgctggatattcaggaagacgaaaacggcatctgggcctccttcgactatgccaccgatctgttcgacgcctccaccgtggaacgcctggccggccattggcgcaacctgttgcgcggcatcgtcgccaacccacgacagcggctcggcgagttgccgctgctggatgtgccggagcaggcgcagtggaacgcgacggaggcggagtatccgcggggagtgacgattcacgcgctggtggaggagcaggcggcgcgggatccggagcgggcggcgctgcggttcgaagggcaggcgctgagctatggggagctggtggcgcgggtcaaagagacgtcccgcgagatggggccgcggcaactggtggcgatcagcctggagcggggcttcgcacaggtagtggcgcagttggcggcgctggaggcgggcggggcatacgtgccggtggacccgagctatccggaggagcggcgggagtacatgctggcggactccggggccggggtggtggtgaacggggaagggatcgttaagcgcgaggccgggcgggaggtggacgggctggcgtacatgatctacacgtcggggtcgacggggcgtccgaaagggacgatgctgcggcacgaagggctgtgcaacctggcgcggtggcagcagcgggcgttcgggatcacgcgggagagccgggtattgcagtttgcgccgtcgagtttcgatgcctcggtgtgggagacgttcatggcgctggcgaacggagcgacgctggtgctggggcggcaggaagtattgaggcagatggaggcgctgcacaagctgttggtggaggagaagattacgcacgtgacgctgccgccgacggtgttggaggcattggaggcggagggcttaccggatttgcaggtggtgatcgcggcgggcgaggcgtgcgggcgggaactggtggagaagtgggggcgggggcggcggttcttcaacgcgtacgggccgacggagacgacggtgtgcgcgtcggcatatgagtgcaaggtgggcgaacgggtagcgccggccatcgggcggccgattgcgaacatgcagatgtgggtgctggacgagtggggacggccggcgccggtaggcgtgagtggggagttgcacatcgggggcgtgggcctggcggcagggtactgggagcggccggagctgacggcggagaagtttgtcgagacggcgtacgggcgggtgtacaagagcggggacgtggggcgatggcggggcgacggggtggtggagtacgtggggcggcgggacacgcaggtgaagctgcgggggtaccggatcgagttgggggaggtggaggaagcgctgcggagctgcgcgggggtacgcgcggcgggggtgggagtggacggggaccggctggtggggtatgtggtcggcggggacatagccgaggtgcggcgggagctgcgggggcggctgccggagtacatggtgccgggggtggtgatggcattggaggagatgccgttgctgccgaacggcaagatcgaccggcaggcgttgccgcaaccggatgcggccgc

SEQ ID NO: 160 - protein, 916 aa, Artificial Sequence
  Description of Artificial Sequence: Synthetic polypeptide
SRTTDAVSTIPLADRQQPLALSFAQERQWFLWQLEPESAAYHIPSALRLRGRLDVDALQRSFDSLVARHETLRTRFRLEGGRSYQQVQPAVSVSIEREQFGEEGLIERIQAIVVQPFDLERGPLLRVNLLQLAEDDHVLVLVQHHIVSDGWSMQVMVEELVQLYAAYSQGLDVVLPALPIQYADYALWQRSWMEAGEKERQLAYWTGLLGGEQPVLELPFDRPRPARQSHRGAQLGFELSRELVEAVRALAQREGASSFMLLLASFQALLYRYSGQADIRVGVPIANRNRVETERLIGFFVNTQVLKADLDGRMGFDELLAQARQRALEAQAHQDLPFEQLVEALQPERNASHNPLFQVLFNHQSEIRSVTPEVQLEDLRLEGLAWDGQTAQFDLTLDIQEDENGIWASFDYATDLFDASTVERLAGHWRNLLRGIVANPRQRLGELPLLDVPEQAQWNATEAEYPRGVTIHALVEEQAARDPERAALRFEGQALSYGELVARVKETSREMGPRQLVAISLERGFAQVVAQLAALEAGGAYVPVDPSYPEERREYMLADSGAGVVVNGEGIVKREAGREVDGLAYMIYTSGSTGRPKGTMLRHEGLCNLARWQQRAFGITRESRVLQFAPSSFDASVWETFMALANGATLVLGRQEVLRQMEALHKLLVEEKITHVTLPPTVLEALEAEGLPDLQVVIAAGEACGRELVEKWGRGRRFFNAYGPTETTVCASAYECKVGERVAPAIGRPIANMQMWVLDEWGRPAPVGVSGELHIGGVGLAAGYWERPELTAEKFVETAYGRVYKSGDVGRWRGDGVVEYVGRRDTQVKLRGYRIELGEVEEALRSCAGVRAAGVGVDGDRLVGYVVGGDIAEVRRELRGRLPEYMVPGVVMALEEMPLLPNGKIDRQALPQPDAA

SEQ ID NO: 161 - DNA, 2750 bp, Artificial Sequence
  Description of Artificial Sequence: Synthetic polynucleotide
tctagaacgacggatgcggtctcgacgataccgcttgccgatcggcagcaaccgttggcactgtccttcgctcaggagcgtcagtggttcctctggcaactggagccggaaagcgcggcctaccatattccgagtgccttgcgcctacgcgggcggctggacgtggatgccttgcaacgcagcttcgacagcctggtcgcgcggcatgaaaccttgcgtacccgcttccggctggagggagggcgttcgtaccagcaggtacaacctgcggttagcgtttccatcgagcgggaacagttcggtgaagaaggcctgatcgaacggatacaggccatcgttgtgcagccattcgacctggaacgggggccgctgctgcgggtgaacctgttgcaactggccgaggacgaccatgtactggtgctggtccagcaccacatcgtgtccgatggttggtcgatgcaggtgatggtcgaggaactggtccagctctatgccgcctatagccaagggctcgacgtggtgttgccagccctgccgatccagtacgcggactacgccctgtggcagcgcagctggatggaggcgggggaaaaggagcgccagttggcgtactggaccggcctgctgggcggcgagcagccggtgctggagttgccgttcgatcggccgcgtccggcccggcagagccatcgtggcgcgcagttgggtttcgagctatcgcgggaactggtcgaggccgtgagagccttggcccagcgtgaaggcgccagtagtttcatgctgttgctggcctcgttccaggcgctgttgtatcgctacagcgggcaggcggatatccgtgtcggtgtgccgatcgccaatcgcaaccgcgtggagaccgagcggctgatcggcttcttcgtcaacacccaggtgctcaaggccgacctggacggtcggatgggcttcgacgagctgctggcccaggcccgccaacgcgcgctggaggcccaggcgcaccaggacctgccgttcgagcaactggtggaagccttgcagccggagcgcaatgccagccacaacccactgttccaggtgctgttcaaccatcagagcgagatacgctcggtgacgcccgaggttcagttggaggacctgcgtctggaaggcctggcctgggacggccagactgcgcagttcgacctgacgctggatattcaggaagacgaaaacggcatctgggcctccttcgactatgccaccgatctgttcgacgcctccaccgtggaacgcctggccggccattggcgcaacctgttgcgcggcatcgtcgccaacccacgacagcggctcggcgagttgccgctgctggatgcgccggagcaggcgcagtggaacgcgacggaggcggagtatccgcggggagtgacgattcacgcgctggtggaggagcaggcggcgcgggatccggagcgggcggcgctgcggttcgaagggcaggcgctgagctatggggagctggtggcgcgggtcaaagagacgtcccgcgagatggggccgcggcaactggtggcgatcagcctggagcggggcttcgcacaggtagtggcgcagttggcggcgctggaggcgggcggggcatacgtgccggtggacccgagctatccggaggagcggcgggagtacatgctggcggactccggggccggggtggtggtgaacggggaagggatcgttaagcgcgaggccgggcgggaggtggacgggctggcgtacatgatctacacgtcggggtcgacggggcgtccgaaagggacgatgctgcggcacgaagggctgtgcaacctggcgcggtggcagcagcgggcgttcgggatcacgcgggagagccgggtattgcagtttgcgccgtcgagtttcgatgcctcggtgtgggagacgttcatggcgctggcgaacggagcgacgctggtgctggggcggcaggaagtattgaggcagatggaggcgctgcacaagctgttggtggaggagaagattacgcacgtgacgctgccgccgacggtgttggaggcattggaggcggagggcttaccggatttgcaggtggtgatcgcggcgggcgaggcgtgcgggcgggaactggtggagaagtgggggcgggggcggcggttcttcaacgcgtacgggccgacggagacgacggtgtgcgcgtcggcatatgagtgcaaggtgggcgaacgggtagcgccggccatcgggcggccgattgcgaacatgcagatgtgggtgctggacgagtggggacggccggcgccggtaggcgtgagtggggagttgcacatcgggggcgtgggcctggcggcagggtactgggagcggccggagctgacggcggagaagtttgtcgagacggcgtacgggcgggtgtacaagagcggggacgtggggcgatggcggggcgacggggtggtggagtacgtggggcggcgggacacgcaggtgaagctgcgggggtaccggatcgagttgggggaggtggaggaagcgctgcggagctgcgcgggggtacgcgcggcgggggtgggagtggacggggaccggctggtggggtatgtggtcggcggggacatagccgaggtgcggcgggagctgcgggggcggctgccggagtacatggtgccgggggtggtgatggcattggaggagatgccgttgctgccgaacggcaagatcgaccggcaggcgttgccgcaaccggatgcggccgc

SEQ ID NO: 162 - protein, 916 aa, Artificial Sequence
  Description of Artificial Sequence: Synthetic polypeptide
SRTTDAVSTIPLADRQQPLALSFAQERQWFLWQLEPESAAYHIPSALRLRGRLDVDALQRSFDSLVARHETLRTRFRLEGGRSYQQVQPAVSVSIEREQFGEEGLIERIQAIVVQPFDLERGPLLRVNLLQLAEDDHVLVLVQHHIVSDGWSMQVMVEELVQLYAAYSQGLDVVLPALPIQYADYALWQRSWMEAGEKERQLAYWTGLLGGEQPVLELPFDRPRPARQSHRGAQLGFELSRELVEAVRALAQREGASSFMLLLASFQALLYRYSGQADIRVGVPIANRNRVETERLIGFFVNTQVLKADLDGRMGFDELLAQARQRALEAQAHQDLPFEQLVEALQPERNASHNPLFQVLFNHQSEIRSVTPEVQLEDLRLEGLAWDGQTAQFDLTLDIQEDENGIWASFDYATDLFDASTVERLAGHWRNLLRGIVANPRQRLGELPLLDAPEQAQWNATEAEYPRGVTIHALVEEQAARDPERAALRFEGQALSYGELVARVKETSREMGPRQLVAISLERGFAQVVAQLAALEAGGAYVPVDPSYPEERREYMLADSGAGVVVNGEGIVKREAGREVDGLAYMIYTSGSTGRPKGTMLRHEGLCNLARWQQRAFGITRESRVLQFAPSSFDASVWETFMALANGATLVLGRQEVLRQMEALHKLLVEEKITHVTLPPTVLEALEAEGLPDLQVVIAAGEACGRELVEKWGRGRRFFNAYGPTETTVCASAYECKVGERVAPAIGRPIANMQMWVLDEWGRPAPVGVSGELHIGGVGLAAGYWERPELTAEKFVETAYGRVYKSGDVGRWRGDGVVEYVGRRDTQVKLRGYRIELGEVEEALRSCAGVRAAGVGVDGDRLVGYVVGGDIAEVRRELRGRLPEYMVPGVVMALEEMPLLPNGKIDRQALPQPDAA

SEQ ID NO: 163 - DNA, 2762 bp, Artificial Sequence
  Description of Artificial Sequence: Synthetic polynucleotide
tctagaacgacggatgcggtctcgacgataccgcttgccgatcggcagcaaccgttggcactgtccttcgctcaggagcgtcagtggttcctctggcaactggagccggaaagcgcggcctaccatattccgagtgccttgcgcctacgcgggcggctggacgtggatgccttgcaacgcagcttcgacagcctggtcgcgcggcatgaaaccttgcgtacccgcttccggctggagggagggcgttcgtaccagcaggtacaacctgcggttagcgtttccatcgagcgggaacagttcggtgaagaaggcctgatcgaacggatacaggccatcgttgtgcagccattcgacctggaacgggggccgctgctgcgggtgaacctgttgcaactggccgaggacgaccatgtactggtgctggtccagcaccacatcgtgtccgatggttggtcgatgcaggtgatggtcgaggaactggtccagctctatgccgcctatagccaagggctcgacgtggtgttgccagccctgccgatccagtacgcggactacgccctgtggcagcgcagctggatggaggcgggggaaaaggagcgccagttggcgtactggaccggcctgctgggcggcgagcagccggtgctggagttgccgttcgatcggccgcgtccggcccggcagagccatcgtggcgcgcagttgggtttcgagctatcgcgggaactggtcgaggccgtgagagccttggcccagcgtgaaggcgccagtagtttcatgctgttgctggcctcgttccaggcgctgttgtatcgctacagcgggcaggcggatatccgtgtcggtgtgccgatcgccaatcgcaaccgcgtggagaccgagcggctgatcggcttcttcgtcaacacccaggtgctcaaggccgacctggacggtcggatgggcttcgacgagctgctggcccaggcccgccaacgcgcgctggaggcccaggcgcaccaggacctgccgttcgagcaactggtggaagccttgcagccggagcgcaatgccagccacaacccactgttccaggtgctgttcaaccatcagagcgagatacgctcggtgacgcccgaggttcagttggaggacctgcgtctggaaggcctggcctgggacggccagactgcgcagttcgacctgacgctggatattcaggaagacgaaaacggcatctgggcctccttcgactatgccaccgatctgttcgacgcctccaccgtggaacgcctggccggccattggcgcaacctgttgcgcggcatcgtcgccaacccacgacagcggctcggcgagttgccgctgctggatgcgccggagcgccggcagaccctctccgaatggaacgcgacggaggcggagtatccgcggggagtgacgattcacgcgctggtggaggagcaggcggcgcgggatccggagcgggcggcgctgcggttcgaagggcaggcgctgagctatggggagctggtggcgcgggtcaaagagacgtcccgcgagatggggccgcggcaactggtggcgatcagcctggagcggggcttcgcacaggtagtggcgcagttggcggcgctggaggcgggcggggcatacgtgccggtggacccgagctatccggaggagcggcgggagtacatgctggcggactccggggccggggtggtggtgaacggggaagggatcgttaagcgcgaggccgggcgggaggtggacgggctggcgtacatgatctacacgtcggggtcgacggggcgtccgaaagggacgatgctgcggcacgaagggctgtgcaacctggcgcggtggcagcagcgggcgttcgggatcacgcgggagagccgggtattgcagtttgcgccgtcgagtttcgatgcctcggtgtgggagacgttcatggcgctggcgaacggagcgacgctggtgctggggcggcaggaagtattgaggcagatggaggcgctgcacaagctgttggtggaggagaagattacgcacgtgacgctgccgccgacggtgttggaggcattggaggcggagggcttaccggatttgcaggtggtgatcgcggcgggcgaggcgtgcgggcgggaactggtggagaagtgggggcgggggcggcggttcttcaacgcgtacgggccgacggagacgacggtgtgcgcgtcggcatatgagtgcaaggtgggcgaacgggtagcgccggccatcgggcggccgattgcgaacatgcagatgtgggtgctggacgagtggggacggccggcgccggtaggcgtgagtggggagttgcacatcgggggcgtgggcctggcggcagggtactgggagcggccggagctgacggcggagaagtttgtcgagacggcgtacgggcgggtgtacaagagcggggacgtggggcgatggcggggcgacggggtggtggagtacgtggggcggcgggacacgcaggtgaagctgcgggggtaccggatcgagttgggggaggtggaggaagcgctgcggagctgcgcgggggtacgcgcggcgggggtgggagtggacggggaccggctggtggggtatgtggtcggcggggacatagccgaggtgcggcgggagctgcgggggcggctgccggagtacatggtgccgggggtggtgatggcattggaggagatgccgttgctgccgaacggcaagatcgaccggcaggcgttgccgcaaccggatgcggccgc

SEQ ID NO: 164 - protein, 920 aa, Artificial Sequence
  Description of Artificial Sequence: Synthetic polypeptide
SRTTDAVSTIPLADRQQPLALSFAQERQWFLWQLEPESAAYHIPSALRLRGRLDVDALQRSFDSLVARHETLRTRFRLEGGRSYQQVQPAVSVSIEREQFGEEGLIERIQAIVVQPFDLERGPLLRVNLLQLAEDDHVLVLVQHHIVSDGWSMQVMVEELVQLYAAYSQGLDVVLPALPIQYADYALWQRSWMEAGEKERQLAYWTGLLGGEQPVLELPFDRPRPARQSHRGAQLGFELSRELVEAVRALAQREGASSFMLLLASFQALLYRYSGQADIRVGVPIANRNRVETERLIGFFVNTQVLKADLDGRMGFDELLAQARQRALEAQAHQDLPFEQLVEALQPERNASHNPLFQVLFNHQSEIRSVTPEVQLEDLRLEGLAWDGQTAQFDLTLDIQEDENGIWASFDYATDLFDASTVERLAGHWRNLLRGIVANPRQRLGELPLLDAPERRQTLSEWNATEAEYPRGVTIHALVEEQAARDPERAALRFEGQALSYGELVARVKETSREMGPRQLVAISLERGFAQVVAQLAALEAGGAYVPVDPSYPEERREYMLADSGAGVVVNGEGIVKREAGREVDGLAYMIYTSGSTGRPKGTMLRHEGLCNLARWQQRAFGITRESRVLQFAPSSFDASVWETFMALANGATLVLGRQEVLRQMEALHKLLVEEKITHVTLPPTVLEALEAEGLPDLQVVIAAGEACGRELVEKWGRGRRFFNAYGPTETTVCASAYECKVGERVAPAIGRPIANMQMWVLDEWGRPAPVGVSGELHIGGVGLAAGYWERPELTAEKFVETAYGRVYKSGDVGRWRGDGVVEYVGRRDTQVKLRGYRIELGEVEEALRSCAGVRAAGVGVDGDRLVGYVVGGDIAEVRRELRGRLPEYMVPGVVMALEEMPLLPNGKIDRQALPQPDAA

SEQ ID NO: 165 - DNA, 2861 bp, Artificial Sequence
  Description of Artificial Sequence: Synthetic polynucleotide
tctagaacgacggatgcggtctcgacgataccgcttgccgatcggcagcaaccgttggcactgtccttcgctcaggagcgtcagtggttcctctggcaactggagccggaaagcgcggcctaccatattccgagtgccttgcgcctacgcgggcggctggacgtggatgccttgcaacgcagcttcgacagcctggtcgcgcggcatgaaaccttgcgtacccgcttccggctggagggagggcgttcgtaccagcaggtacaacctgcggttagcgtttccatcgagcgggaacagttcggtgaagaaggcctgatcgaacggatacaggccatcgttgtgcagccattcgacctggaacgggggccgctgctgcgggtgaacctgttgcaactggccgaggacgaccatgtactggtgctggtccagcaccacatcgtgtccgatggttggtcgatgcaggtgatggtcgaggaactggtccagctctatgccgcctatagccaagggctcgacgtggtgttgccagccctgccgatccagtacgcggactacgccctgtggcagcgcagctggatggaggcgggggaaaaggagcgccagttggcgtactggaccggcctgctgggcggcgagcagccggtgctggagttgccgttcgatcggccgcgtccggcccggcagagccatcgtggcgcgcagttgggtttcgagctatcgcgggaactggtcgaggccgtgagagccttggcccagcgtgaaggcgccagtagtttcatgctgttgctggcctcgttccaggcgctgttgtatcgctacagcgggcaggcggatatccgtgtcggtgtgccgatcgccaatcgcaaccgcgtggagaccgagcggctgatcggcttcttcgtcaacacccaggtgctcaaggccgacctggacggtcggatgggcttcgacgagctgctggcccaggcccgccaacgcgcgctggaggcccaggcgcaccaggacctgccgttcgagcaactggtggaagccttgcagccggagcgcaatgccagccacaacccactgttccaggtgctgttcaaccatcagagcgagatacgctcggtgacgcccgaggttcagttggaggacctgcgtctggaaggcctggcctgggacggccagactgcgcagttcgacctgacgctggatattcaggaagacgaaaacggcatctgggcctccttcgactatgccaccgatctgttcgacgcctccaccgtggaacgcctggccggccattggcgcaacctgttgcgcggcatcgtcgccgaacctgagacggcagtttcgcggctgcggctgctgacgttgagtgaagagcaccaggtgctcaacgagtggaacaacacggcgcgtgagtttgatatcacgggtggaatccatcgcttgtttgaagcgcaggtggagcgcacgccgacagcgacggcgctggtggttggccatgagtggatcagttatcacgaactgaacgggcgcgccaacagtctcgctcatcacctggtccaatcaggagtgaaagcagaagaccgtgttggcatcctgatggaacgttcgccagcgatggtcgtgtcgctcctcgcagtgctaaaggctggtggttgttacgtgccactagatccgcaatatccgcgtgagcggttggagttcatgcaggccgacgcggcagtttctgcgctcttaacgacgcgtgctgtcgccaccacgtgtggattacaaactgatcacgtgatctatgttgatgaagttgagcaaaccgcgactgagaatctaaatgtggaaatcagctcgcaacaacttgcttacctgatttatacctcaggctcgacgggagtgccgaaaggcgttgcaatcacgcatggcaacgcgacaactttcatacactgggccagtgaaatcttcgacgagaaagcgctgaacggagtcctcttcagcacctcgatctgtttcgatctttcaatcttcgagctgttcgtcacgctcagcaacggcggcaaggtgattctcgcggacaacgctctgcaactaccaaccctgcctgcggcgaacgaagtcacgctcatcaacaccgtaccatctgccatgaccgagctaatacgttcgggcgccgtgccgaaatcggtgcggatggtgaatctcgccggcgaagcattgagcaaagatttagtcaccgagatttacaccacaaccaacgtcgaaacagtctacaacctctatggaccatccgaggacacgacgtactccaccttcacagccaccagccccggtgagcccgtaaccatcggcaaaccgatcgcgaacacgcgtgcctacgtgctcgacgaacagttccagattgctcccgtcggcgtggtgggcgaactctatctcggcggcgccggcctcgcgcgtggttactggcagcggtccgatctgacggccacgaagtttatccccgacaatttcagccctatgcccggtggtcgtttgtaccggacgggcgatctcgctcgctacctcgataacggtgagttggagtttttaggacgcgccgaccatcaggtgaaggtgcgtggctatcgcatcgagctcggggagatcgagagcgagttgcggcagcacgcgcaggtgcgggaggcggtggtcgtggcgcgtgcagaacgcctcgtggcttacaccgtgagcacgtcaaccgtgaacagtgtcgagttgcgcgaacatttgcggcaacgtttgccggaatacatggtgccgtcagcgcttgtgcagttgccgtcaatgcctctgactccaaacggcaagctcgaccgcaaggcgttgccgcaaccggatgcggccgc

SEQ ID NO: 166 - protein, 953 aa, Artificial Sequence
  Description of Artificial Sequence: Synthetic polypeptide
SRTTDAVSTIPLADRQQPLALSFAQERQWFLWQLEPESAAYHIPSALRLRGRLDVDALQRSFDSLVARHETLRTRFRLEGGRSYQQVQPAVSVSIEREQFGEEGLIERIQAIVVQPFDLERGPLLRVNLLQLAEDDHVLVLVQHHIVSDGWSMQVMVEELVQLYAAYSQGLDVVLPALPIQYADYALWQRSWMEAGEKERQLAYWTGLLGGEQPVLELPFDRPRPARQSHRGAQLGFELSRELVEAVRALAQREGASSFMLLLASFQALLYRYSGQADIRVGVPIANRNRVETERLIGFFVNTQVLKADLDGRMGFDELLAQARQRALEAQAHQDLPFEQLVEALQPERNASHNPLFQVLFNHQSEIRSVTPEVQLEDLRLEGLAWDGQTAQFDLTLDIQEDENGIWASFDYATDLFDASTVERLAGHWRNLLRGIVAEPETAVSRLRLLTLSEEHQVLNEWNNTAREFDITGGIHRLFEAQVERTPTATALVVGHEWISYHELNGRANSLAHHLVQSGVKAEDRVGILMERSPAMVVSLLAVLKAGGCYVPLDPQYPRERLEFMQADAAVSALLTTRAVATTCGLQTDHVIYVDEVEQTATENLNVEISSQQLAYLIYTSGSTGVPKGVAITHGNATTFIHWASEIFDEKALNGVLFSTSICFDLSIFELFVTLSNGGKVILADNALQLPTLPAANEVTLINTVPSAMTELIRSGAVPKSVRMVNLAGEALSKDLVTEIYTTTNVETVYNLYGPSEDTTYSTFTATSPGEPVTIGKPIANTRAYVLDEQFQIAPVGVVGELYLGGAGLARGYWQRSDLTATKFIPDNFSPMPGGRLYRTGDLARYLDNGELEFLGRADHQVKVRGYRIELGEIESELRQHAQVREAVVVARAERLVAYTVSTSTVNSVELREHLRQRLPEYMVPSALVQLPSMPLTPNGKLDRKALPQPDAA

SEQ ID NO: 167 - DNA, 2861 bp, Artificial Sequence
  Description of Artificial Sequence: Synthetic polynucleotide
tctagaacgacggatgcggtctcgacgataccgcttgccgatcggcagcaaccgttggcactgtccttcgctcaggagcgtcagtggttcctctggcaactggagccggaaagcgcggcctaccatattccgagtgccttgcgcctacgcgggcggctggacgtggatgccttgcaacgcagcttcgacagcctggtcgcgcggcatgaaaccttgcgtacccgcttccggctggagggagggcgttcgtaccagcaggtacaacctgcggttagcgtttccatcgagcgggaacagttcggtgaagaaggcctgatcgaacggatacaggccatcgttgtgcagccattcgacctggaacgggggccgctgctgcgggtgaacctgttgcaactggccgaggacgaccatgtactggtgctggtccagcaccacatcgtgtccgatggttggtcgatgcaggtgatggtcgaggaactggtccagctctatgccgcctatagccaagggctcgacgtggtgttgccagccctgccgatccagtacgcggactacgccctgtggcagcgcagctggatggaggcgggggaaaaggagcgccagttggcgtactggaccggcctgctgggcggcgagcagccggtgctggagttgccgttcgatcggccgcgtccggcccggcagagccatcgtggcgcgcagttgggtttcgagctatcgcgggaactggtcgaggccgtgagagccttggcccagcgtgaaggcgccagtagtttcatgctgttgctggcctcgttccaggcgctgttgtatcgctacagcgggcaggcggatatccgtgtcggtgtgccgatcgccaatcgcaaccgcgtggagaccgagcggctgatcggcttcttcgtcaacacccaggtgctcaaggccgacctggacggtcggatgggcttcgacgagctgctggcccaggcccgccaacgcgcgctggaggcccaggcgcaccaggacctgccgttcgagcaactggtggaagccttgcagccggagcgcaatgccagccacaacccactgttccaggtgctgttcaaccatcagagcgagatacgctcggtgacgcccgaggttcagttggaggacctgcgtctggaaggcctggcctgggacggccagactgcgcagttcgacctgacgctggatattcaggaagacgaatacggcatctgggcctccttcgactatgccaccgatctgttcgacgcctccaccgtggaacgcctggccggccattggcgcaacctgttgcgcggcatcgtcgccaacccacgacagcggctcggcgagttgccgctgctggatttgagtgaagagcaccaggtgctcaacgagtggaacaacacggcgcgtgagtttgatatcacgggtggaatccatcgcttgtttgaagcgcaggtggagcgcacgccgacagcgacggcgctggtggttggccatgagtggatcagttatcacgaactgaacgggcgcgccaacagtctcgctcatcacctggtccaatcaggagtgaaagcagaagaccgtgttggcatcctgatggaacgttcgccagcgatggtcgtgtcgctcctcgcagtgctaaaggctggtggttgttacgtgccactagatccgcaatatccgcgtgagcggttggagttcatgcaggccgacgcggcagtttctgcgctcttaacgacgcgtgctgtcgccaccacgtgtggattacaaactgatcacgtgatctatgttgatgaagttgagcaaaccgcgactgagaatctaaatgtggaaatcagctcgcaacaacttgcttacctgatttatacctcaggctcgacgggagtgccgaaaggcgttgcaatcacgcatggcaacgcgacaactttcatacactgggccagtgaaatcttcgacgagaaagcgctgaacggagtcctcttcagcacctcgatctgtttcgatctttcaatcttcgagctgttcgtcacgctcagcaacggcggcaaggtgattctcgcggacaacgctctgcaactaccaaccctgcctgcggcgaacgaagtcacgctcatcaacaccgtaccatctgccatgaccgagctaatacgttcgggcgccgtgccgaaatcggtgcggatggtgaatctcgccggcgaagcattgagcaaagatttagtcaccgagatttacaccacaaccaacgtcgaaacagtctacaacctctatggaccatccgaggacacgacgtactccaccttcacagccaccagccccggtgagcccgtaaccatcggcaaaccgatcgcgaacacgcgtgcctacgtgctcgacgaacagttccagattgctcccgtcggcgtggtgggcgaactctatctcggcggcgccggcctcgcgcgtggttactggcagcggtccgatctgacggccacgaagtttatccccgacaatttcagccctatgcccggtggtcgtttgtaccggacgggcgatctcgctcgctacctcgataacggtgagttggagtttttaggacgcgccgaccatcaggtgaaggtgcgtggctatcgcatcgagctcggggagatcgagagcgagttgcggcagcacgcgcaggtgcgggaggcggtggtcgtggcgcgtgcagaacgcctcgtggcttacaccgtgagcacgtcaaccgtgaacagtgtcgagttgcgcgaacatttgcggcaacgtttgccggaatacatggtgccgtcagcgcttgtgcagttgccgtcaatgcctctgactccaaacggcaagctcgaccgcaaggcgttgccgcaaccggatgcggccgc

SEQ ID NO: 168 - protein, 953 aa, Artificial Sequence
  Description of Artificial Sequence: Synthetic polypeptide
SRTTDAVSTIPLADRQQPLALSFAQERQWFLWQLEPESAAYHIPSALRLRGRLDVDALQRSFDSLVARHETLRTRFRLEGGRSYQQVQPAVSVSIEREQFGEEGLIERIQAIVVQPFDLERGPLLRVNLLQLAEDDHVLVLVQHHIVSDGWSMQVMVEELVQLYAAYSQGLDVVLPALPIQYADYALWQRSWMEAGEKERQLAYWTGLLGGEQPVLELPFDRPRPARQSHRGAQLGFELSRELVEAVRALAQREGASSFMLLLASFQALLYRYSGQADIRVGVPIANRNRVETERLIGFFVNTQVLKADLDGRMGFDELLAQARQRALEAQAHQDLPFEQLVEALQPERNASHNPLFQVLFNHQSEIRSVTPEVQLEDLRLEGLAWDGQTAQFDLTLDIQEDEYGIWASFDYATDLFDASTVERLAGHWRNLLRGIVANPRQRLGELPLLDLSEEHQVLNEWNNTAREFDITGGIHRLFEAQVERTPTATALVVGHEWISYHELNGRANSLAHHLVQSGVKAEDRVGILMERSPAMVVSLLAVLKAGGCYVPLDPQYPRERLEFMQADAAVSALLTTRAVATTCGLQTDHVIYVDEVEQTATENLNVEISSQQLAYLIYTSGSTGVPKGVAITHGNATTFIHWASEIFDEKALNGVLFSTSICFDLSIFELFVTLSNGGKVILADNALQLPTLPAANEVTLINTVPSAMTELIRSGAVPKSVRMVNLAGEALSKDLVTEIYTTTNVETVYNLYGPSEDTTYSTFTATSPGEPVTIGKPIANTRAYVLDEQFQIAPVGVVGELYLGGAGLARGYWQRSDLTATKFIPDNFSPMPGGRLYRTGDLARYLDNGELEFLGRADHQVKVRGYRIELGEIESELRQHAQVREAVVVARAERLVAYTVSTSTVNSVELREHLRQRLPEYMVPSALVQLPSMPLTPNGKLDRKALPQPDAA

SEQ ID NO: 169 - DNA, 2861 bp, Artificial Sequence
  Description of Artificial Sequence: Synthetic polynucleotide
tctagaacgacggatgcggtctcgacgataccgcttgccgatcggcagcaaccgttggcactgtccttcgctcaggagcgtcagtggttcctctggcaactggagccggaaagcgcggcctaccatattccgagtgccttgcgcctacgcgggcggctggacgtggatgccttgcaacgcagcttcgacagcctggtcgcgcggcatgaaaccttgcgtacccgcttccggctggagggagggcgttcgtaccagcaggtacaacctgcggttagcgtttccatcgagcgggaacagttcggtgaagaaggcctgatcgaacggatacaggccatcgttgtgcagccattcgacctggaacgggggccgctgctgcgggtgaacctgttgcaactggccgaggacgaccatgtactggtgctggtccagcaccacatcgtgtccgatggttggtcgatgcaggtgatggtcgaggaactggtccagctctatgccgcctatagccaagggctcgacgtggtgttgccagccctgccgatccagtacgcggactacgccctgtggcagcgcagctggatggaggcgggggaaaaggagcgccagttggcgtactggaccggcctgctgggcggcgagcagccggtgctggagttgccgttcgatcggccgcgtccggcccggcagagccatcgtggcgcgcagttgggtttcgagctatcgcgggaactggtcgaggccgtgagagccttggcccagcgtgaaggcgccagtagtttcatgctgttgctggcctcgttccaggcgctgttgtatcgctacagcgggcaggcggatatccgtgtcggtgtgccgatcgccaatcgcaaccgcgtggagaccgagcggctgatcggcttcttcgtcaacacccaggtgctcaaggccgacctggacggtcggatgggcttcgacgagctgctggcccaggcccgccaacgcgcgctggaggcccaggcgcaccaggacctgccgttcgagcaactggtggaagccttgcagccggagcgcaatgccagccacaacccactgttccaggtgctgttcaaccatcagagcgagatacgctcggtgacgcccgaggttcagttggaggacctgcgtctggaaggcctggcctgggacggccagactgcgcagttcgacctgacgctggatattcaggaagacgaaaacggcatctgggcctccttcgactatgccaccgatctgttcgacgcctccaccgtggaacgcctggccggccattggcgcaacctgttgcgcggcatcgtcgccaacccacgacagcggctcggcgagttgccgctgctggatgcgccggagcgccggcagaccctctccgaatggaacaacacggcgcgtgagtttgatatcacgggtggaatccatcgcttgtttgaagcgcaggtggagcgcacgccgacagcgacggcgctggtggttggccatgagtggatcagttatcacgaactgaacgggcgcgccaacagtctcgctcatcacctggtccaatcaggagtgaaagcagaagaccgtgttggcatcctgatggaacgttcgccagcgatggtcgtgtcgctcctcgcagtgctaaaggctggtggttgttacgtgccactagatccgcaatatccgcgtgagcggttggagttcatgcaggccgacgcggcagtttctgcgctcttaacgacgcgtgctgtcgccaccacgtgtggattacaaactgatcacgtgatctatgttgatgaagttgagcaaaccgcgactgagaatctaaatgtggaaatcagctcgcaacaacttgcttacctgatttatacctcaggctcgacgggagtgccgaaaggcgttgcaatcacgcatggcaacgcgacaactttcatacactgggccagtgaaatcttcgacgagaaagcgctgaacggagtcctcttcagcacctcgatctgtttcgatctttcaatcttcgagctgttcgtcacgctcagcaacggcggcaaggtgattctcgcggacaacgctctgcaactaccaaccctgcctgcggcgaacgaagtcacgctcatcaacaccgtaccatctgccatgaccgagctaatacgttcgggcgccgtgccgaaatcggtgcggatggtgaatctcgccggcgaagcattgagcaaagatttagtcaccgagatttacaccacaaccaacgtcgaaacagtctacaacctctatggaccatccgaggacacgacgtactccaccttcacagccaccagccccggtgagcccgtaaccatcggcaaaccgatcgcgaacacgcgtgcctacgtgctcgacgaacagttccagattgctcccgtcggcgtggtgggcgaactctatctcggcggcgccggcctcgcgcgtggttactggcagcggtccgatctgacggccacgaagtttatccccgacaatttcagccctatgcccggtggtcgtttgtaccggacgggcgatctcgctcgctacctcgataacggtgagttggagtttttaggacgcgccgaccatcaggtgaaggtgcgtggctatcgcatcgagctcggggagatcgagagcgagttgcggcagcacgcgcaggtgcgggaggcggtggtcgtggcgcgtgcagaacgcctcgtggcttacaccgtgagcacgtcaaccgtgaacagtgtcgagttgcgcgaacatttgcggcaacgtttgccggaatacatggtgccgtcagcgcttgtgcagttgccgtcaatgcctctgactccaaacggcaagctcgaccgcaaggcgttgccgcaaccggatgcggccgc

SEQ ID NO: 170 - protein, 953 aa, Artificial Sequence
  Description of Artificial Sequence: Synthetic polypeptide
SRTTDAVSTIPLADRQQPLALSFAQERQWFLWQLEPESAAYHIPSALRLRGRLDVDALQRSFDSLVARHETLRTRFRLEGGRSYQQVQPAVSVSIEREQFGEEGLIERIQAIVVQPFDLERGPLLRVNLLQLAEDDHVLVLVQHHIVSDGWSMQVMVEELVQLYAAYSQGLDVVLPALPIQYADYALWQRSWMEAGEKERQLAYWTGLLGGEQPVLELPFDRPRPARQSHRGAQLGFELSRELVEAVRALAQREGASSFMLLLASFQALLYRYSGQADIRVGVPIANRNRVETERLIGFFVNTQVLKADLDGRMGFDELLAQARQRALEAQAHQDLPFEQLVEALQPERNASHNPLFQVLFNHQSEIRSVTPEVQLEDLRLEGLAWDGQTAQFDLTLDIQEDENGIWASFDYATDLFDASTVERLAGHWRNLLRGIVANPRQRLGELPLLDAPERRQTLSEWNNTAREFDITGGIHRLFEAQVERTPTATALVVGHEWISYHELNGRANSLAHHLVQSGVKAEDRVGILMERSPAMVVSLLAVLKAGGCYVPLDPQYPRERLEFMQADAAVSALLTTRAVATTCGLQTDHVIYVDEVEQTATENLNVEISSQQLAYLIYTSGSTGVPKGVAITHGNATTFIHWASEIFDEKALNGVLFSTSICFDLSIFELFVTLSNGGKVILADNALQLPTLPAANEVTLINTVPSAMTELIRSGAVPKSVRMVNLAGEALSKDLVTEIYTTTNVETVYNLYGPSEDTTYSTFTATSPGEPVTIGKPIANTRAYVLDEQFQIAPVGVVGELYLGGAGLARGYWQRSDLTATKFIPDNFSPMPGGRLYRTGDLARYLDNGELEFLGRADHQVKVRGYRIELGEIESELRQHAQVREAVVVARAERLVAYTVSTSTVNSVELREHLRQRLPEYMVPSALVQLPSMPLTPNGKLDRKALPQPDAA

SEQ ID NO: 171 - DNA, 2933 bp, Artificial Sequence
  Description of Artificial Sequence: Synthetic polynucleotide
tctagaacgacggatgcggtctcgacgataccgcttgccgatcggcagcaaccgttggcactgtccttcgctcaggagcgtcagtggttcctctggcaactggagccggaaagcgcggcctaccatattccgagtgccttgcgcctacgcgggcggctggacgtggatgccttgcaacgcagcttcgacagcctggtcgcgcggcatgaaaccttgcgtacccgcttccggctggagggagggcgttcgtaccagcaggtacaacctgcggttagcgtttccatcgagcgggaacagttcggtgaagaaggcctgatcgaacggatacaggccatcgttgtgcagccattcgacctggaacgggggccgctgctgcgggtgaacctgttgcaactggccgaggacgaccatgtactggtgctggtccagcaccacatcgtgtccgatggttggtcgatgcaggtgatggtcgaggaactggtccagctctatgccgcctatagccaagggctcgacgtggtgttgccagccctgccgatccagtacgcggactacgccctgtggcagcgcagctggatggaggcgggggaaaaggagcgccagttggcgtactggaccggcctgctgggcggcgagcagccggtgctggagttgccgttcgatcggccgcgtccggcccggcagagccatcgtggcgcgcagttgggtttcgagctatcgcgggaactggtcgaggccgtgagagccttggcccagcgtgaaggcgccagtagtttcatgctgttgctggcctcgttccaggcgctgttgtatcgctacagcgggcaggcggatatccgtgtcggtgtgccgatcgccaatcgcaaccgcgtggagaccgagcggctgatcggcttcttcgtcaacacccaggtgctcaaggccgacctggacggtcggatgggcttcgacgagctgctggcccaggcccgccaacgcgcgctggaggcccaggcgcaccaggacctgccgttcgagcaactggtggaagccttgcagccggagcgcaatgccagccacaacccactgttccaggtgctgttcaaccatcagagcgagatacgctcggtgacgcccgaggttcagttggaggacctgcgtctggaaggcctggcctgggacggccagactgcgcagttcgacctgacgctggatattcaggaagacgaaaacggcatctgggcctccttcgactatgccaccgatctgttcgacgcctccaccgtggaacgcctggccggccattggcgcaacctgttgcgcggcatcgtcgccgatgcgggacggaagctgtcggaagtggctgtgatgagcgccgaggagcagcagcagttagtcgagggtttgaaccagacgagcgcagagtacccgcaccatagttgtatacatgagttgtttgaacggcaggcggctgagacacctgaagcggtggcggtcgtcttcggcgaggaacaagtgagctatggagagttgaatgaaagggcgaaccgattagcacactacttacgagaaaagggagtgaagccggagtcacgtgtcggcttgctgctggagcgttcggtagagacgatagtgggtgtgctcggcatcctcaaagccgggggcgcatatgtcccccttgatccggaatacccgcaagagcgcctcgccttcatgctgacagactcaggcatcgaagtcgtcatcacacaggcagcgctgggcgagcgattgcgcgagcagccgcagttgcgcctgctgtgcctcgacaccgagggtgcgagcatcagtgcctacgccgacactgtgcttccgagcgatgcgacgccggacaatctggcctatgtcatctacaccagtggctcgaccggcaacccgaagggcgtgatgatccgtcacgcctcggccctcaacctgctgacggcgctgcgccagagcatctacagccagttgactgcgccgctgcgggtcagcgtcaacgcgccactgtcgttcgacgcctccgtcaagcaactcgtccaactgctggacgggcacacgctggtcatggtgcccgaagaggcgcggcgcgacggcgcggctttggtccagtacctggcacgccagcgcgtcgaagtgctcgactgcacgccttcacagttgcgcctgatgctcggggccgatgtgtccacagggccgctgggcggactgcgtgcggcgctcgtcggcggtgaagagttggacgagaggctgtggcgccaactgagcgagattaccgacattaccgggacagctttcttcaacgtctacggcccgaccgagtgtacggtggacgccaccgtctgccgcgtctctggccaggcgaggcgccccagcattggtcgcccgctggcgaatgtcagtgtctacgtgctggacaggaatctgctgccggtgccggtgggcgtggcggggcagttacacatcgggggcgaaggcgtggcgcggtgctacctgaaccgcccggagttgacggccgagaagttcatccccgatgggttgggcaaggtgccgggagcgagactctaccggacgggcgatctggtgcgatatctgcccgacggccagcttgaatatttgggtcgcagtgaccatcaggtgaaagtccgtggttatcgcatcgaactcggcgagattgaatcggctttgagtctccatccggctgtccgcgaggcggcggcaacggtgcgggcagacgaagctggtgacaagcgtttggtggcttacgtggtgtttgatgacgggcagacgccctcgactggtgagctgcgggcatacttgcaggcgcatttgcccgactacatgattccgcacctcttcgtcactcttgaggcactgccgttgaccgttaacggcaagatcgaccgtgaggcgttgccgcaaccggatgcggccgc

SEQ ID NO: 172 - protein, 977 aa, Artificial Sequence
  Description of Artificial Sequence: Synthetic polypeptide
SRTTDAVSTIPLADRQQPLALSFAQERQWFLWQLEPESAAYHIPSALRLRGRLDVDALQRSFDSLVARHETLRTRFRLEGGRSYQQVQPAVSVSIEREQFGEEGLIERIQAIVVQPFDLERGPLLRVNLLQLAEDDHVLVLVQHHIVSDGWSMQVMVEELVQLYAAYSQGLDVVLPALPIQYADYALWQRSWMEAGEKERQLAYWTGLLGGEQPVLELPFDRPRPARQSHRGAQLGFELSRELVEAVRALAQREGASSFMLLLASFQALLYRYSGQADIRVGVPIANRNRVETERLIGFFVNTQVLKADLDGRMGFDELLAQARQRALEAQAHQDLPFEQLVEALQPERNASHNPLFQVLFNHQSEIRSVTPEVQLEDLRLEGLAWDGQTAQFDLTLDIQEDENGIWASFDYATDLFDASTVERLAGHWRNLLRGIVADAGRKLSEVAVMSAEEQQQLVEGLNQTSAEYPHHSCIHELFERQAAETPEAVAVVFGEEQVSYGELNERANRLAHYLREKGVKPESRVGLLLERSVETIVGVLGILKAGGAYVPLDPEYPQERLAFMLTDSGIEVVITQAALGERLREQPQLRLLCLDTEGASISAYADTVLPSDATPDNLAYVIYTSGSTGNPKGVMIRHASALNLLTALRQSIYSQLTAPLRVSVNAPLSFDASVKQLVQLLDGHTLVMVPEEARRDGAALVQYLARQRVEVLDCTPSQLRLMLGADVSTGPLGGLRAALVGGEELDERLWRQLSEITDITGTAFFNVYGPTECTVDATVCRVSGQARRPSIGRPLANVSVYVLDRNLLPVPVGVAGQLHIGGEGVARCYLNRPELTAEKFIPDGLGKVPGARLYRTGDLVRYLPDGQLEYLGRSDHQVKVRGYRIELGEIESALSLHPAVREAAATVRADEAGDKRLVAYVVFDDGQTPSTGELRAYLQAHLPDYMIPHLFVTLEALPLTVNGKIDREALPQPDAA

SEQ ID NO: 173 - DNA, 2933 bp, Artificial Sequence
  Description of Artificial Sequence: Synthetic polynucleotide
tctagaacgacggatgcggtctcgacgataccgcttgccgatcggcagcaaccgttggcactgtccttcgctcaggagcgtcagtggttcctctggcaactggagccggaaagcgcggcctaccatattccgagtgccttgcgcctacgcgggcggctggacgtggatgccttgcaacgcagcttcgacagcctggtcgcgcggcatgaaaccttgcgtacccgcttccggctggagggagggcgttcgtaccagcaggtacaacctgcggttagcgtttccatcgagcgggaacagttcggtgaagaaggcctgatcgaacggatacaggccatcgttgtgcagccattcgacctggaacgggggccgctgctgcgggtgaacctgttgcaactggccgaggacgaccatgtactggtgctggtccagcaccacatcgtgtccgatggttggtcgatgcaggtgatggtcgaggaactggtccagctctatgccgcctatagccaagggctcgacgtggtgttgccagccctgccgatccagtacgcggactacgccctgtggcagcgcagctggatggaggcgggggaaaaggagcgccagttggcgtactggaccggcctgctgggcggcgagcagccggtgctggagttgccgttcgatcggccgcgtccggcccggcagagccatcgtggcgcgcagttgggtttcgagctatcgcgggaactggtcgaggccgtgagagccttggcccagcgtgaaggcgccagtagtttcatgctgttgctggcctcgttccaggcgctgttgtatcgctacagcgggcaggcggatatccgtgtcggtgtgccgatcgccaatcgcaaccgcgtggagaccgagcggctgatcggcttcttcgtcaacacccaggtgctcaaggccgacctggacggtcggatgggcttcgacgagctgctggcccaggcccgccaacgcgcgctggaggcccaggcgcaccaggacctgccgttcgagcaactggtggaagccttgcagccggagcgcaatgccagccacaacccactgttccaggtgctgttcaaccatcagagcgagatacgctcggtgacgcccgaggttcagttggaggacctgcgtctggaaggcctggcctgggacggccagactgcgcagttcgacctgacgctggatattcaggaagacgaaaacggcatctgggcctccttcgactatgccaccgatctgttcgacgcctccaccgtggaacgcctggccggccattggcgcaacctgttgcgcggcatcgtcgccaacccacgacagcggctcggcgagttgccgctgctggatgccgaggagcagcagcagttagtcgagggtttgaaccagacgagcgcagagtacccgcaccatagttgtatacatgagttgtttgaacggcaggcggctgagacacctgaagcggtggcggtcgtcttcggcgaggaacaagtgagctatggagagttgaatgaaagggcgaaccgattagcacactacttacgagaaaagggagtgaagccggagtcacgtgtcggcttgctgctggagcgttcggtagagacgatagtgggtgtgctcggcatcctcaaagccgggggcgcatatgtcccccttgatccggaatacccgcaagagcgcctcgccttcatgctgacagactcaggcatcgaagtcgtcatcacacaggcagcgctgggcgagcgattgcgcgagcagccgcagttgcgcctgctgtgcctcgacaccgagggtgcgagcatcagtgcctacgccgacactgtgcttccgagcgatgcgacgccggacaatctggcctatgtcatctacaccagtggctcgaccggcaacccgaagggcgtgatgatccgtcacgcctcggccctcaacctgctgacggcgctgcgccagagcatctacagccagttgactgcgccgctgcgggtcagcgtcaacgcgccactgtcgttcgacgcctccgtcaagcaactcgtccaactgctggacgggcacacgctggtcatggtgcccgaagaggcgcggcgcgacggcgcggctttggtccagtacctggcacgccagcgcgtcgaagtgctcgactgcacgccttcacagttgcgcctgatgctcggggccgatgtgtccacagggccgctgggcggactgcgtgcggcgctcgtcggcggtgaagagttggacgagaggctgtggcgccaactgagcgagattaccgacattaccgggacagctttcttcaacgtctacggcccgaccgagtgtacggtggacgccaccgtctgccgcgtctctggccaggcgaggcgccccagcattggtcgcccgctggcgaatgtcagtgtctacgtgctggacaggaatctgctgccggtgccggtgggcgtggcggggcagttacacatcgggggcgaaggcgtggcgcggtgctacctgaaccgcccggagttgacggccgagaagttcatccccgatgggttgggcaaggtgccgggagcgagactctaccggacgggcgatctggtgcgatatctgcccgacggccagcttgaatatttgggtcgcagtgaccatcaggtgaaagtccgtggttatcgcatcgaactcggcgagattgaatcggctttgagtctccatccggctgtccgcgaggcggcggcaacggtgcgggcagacgaagctggtgacaagcgtttggtggcttacgtggtgtttgatgacgggcagacgccctcgactggtgagctgcgggcatacttgcaggcgcatttgcccgactacatgattccgcacctcttcgtcactcttgaggcactgccgttgaccgttaacggcaagatcgaccgtgaggcgttgccgcaaccggatgcggccgc

SEQ ID NO: 174 - protein, 977 aa, Artificial Sequence
  Description of Artificial Sequence: Synthetic polypeptide
SRTTDAVSTIPLADRQQPLALSFAQERQWFLWQLEPESAAYHIPSALRLRGRLDVDALQRSFDSLVARHETLRTRFRLEGGRSYQQVQPAVSVSIEREQFGEEGLIERIQAIVVQPFDLERGPLLRVNLLQLAEDDHVLVLVQHHIVSDGWSMQVMVEELVQLYAAYSQGLDVVLPALPIQYADYALWQRSWMEAGEKERQLAYWTGLLGGEQPVLELPFDRPRPARQSHRGAQLGFELSRELVEAVRALAQREGASSFMLLLASFQALLYRYSGQADIRVGVPIANRNRVETERLIGFFVNTQVLKADLDGRMGFDELLAQARQRALEAQAHQDLPFEQLVEALQPERNASHNPLFQVLFNHQSEIRSVTPEVQLEDLRLEGLAWDGQTAQFDLTLDIQEDENGIWASFDYATDLFDASTVERLAGHWRNLLRGIVANPRQRLGELPLLDAEEQQQLVEGLNQTSAEYPHHSCIHELFERQAAETPEAVAVVFGEEQVSYGELNERANRLAHYLREKGVKPESRVGLLLERSVETIVGVLGILKAGGAYVPLDPEYPQERLAFMLTDSGIEVVITQAALGERLREQPQLRLLCLDTEGASISAYADTVLPSDATPDNLAYVIYTSGSTGNPKGVMIRHASALNLLTALRQSIYSQLTAPLRVSVNAPLSFDASVKQLVQLLDGHTLVMVPEEARRDGAALVQYLARQRVEVLDCTPSQLRLMLGADVSTGPLGGLRAALVGGEELDERLWRQLSEITDITGTAFFNVYGPTECTVDATVCRVSGQARRPSIGRPLANVSVYVLDRNLLPVPVGVAGQLHIGGEGVARCYLNRPELTAEKFIPDGLGKVPGARLYRTGDLVRYLPDGQLEYLGRSDHQVKVRGYRIELGEIESALSLHPAVREAAATVRADEAGDKRLVAYVVFDDGQTPSTGELRAYLQAHLPDYMIPHLFVTLEALPLTVNGKIDREALPQPDAA

SEQ ID NO: 175 - DNA, 2933 bp, Artificial Sequence
  Description of Artificial Sequence: Synthetic polynucleotide
tctagaacgacggatgcggtctcgacgataccgcttgccgatcggcagcaaccgttggcactgtccttcgctcaggagcgtcagtggttcctctggcaactggagccggaaagcgcggcctaccatattccgagtgccttgcgcctacgcgggcggctggacgtggatgccttgcaacgcagcttcgacagcctggtcgcgcggcatgaaaccttgcgtacccgcttccggctggagggagggcgttcgtaccagcaggtacaacctgcggttagcgtttccatcgagcgggaacagttcggtgaagaaggcctgatcgaacggatacaggccatcgttgtgcagccattcgacctggaacgggggccgctgctgcgggtgaacctgttgcaactggccgaggacgaccatgtactggtgctggtccagcaccacatcgtgtccgatggttggtcgatgcaggtgatggtcgaggaactggtccagctctatgccgcctatagccaagggctcgacgtggtgttgccagccctgccgatccagtacgcggactacgccctgtggcagcgcagctggatggaggcgggggaaaaggagcgccagttggcgtactggaccggcctgctgggcggcgagcagccggtgctggagttgccgttcgatcggccgcgtccggcccggcagagccatcgtggcgcgcagttgggtttcgagctatcgcgggaactggtcgaggccgtgagagccttggcccagcgtgaaggcgccagtagtttcatgctgttgctggcctcgttccaggcgctgttgtatcgctacagcgggcaggcggatatccgtgtcggtgtgccgatcgccaatcgcaaccgcgtggagaccgagcggctgatcggcttcttcgtcaacacccaggtgctcaaggccgacctggacggtcggatgggcttcgacgagctgctggcccaggcccgccaacgcgcgctggaggcccaggcgcaccaggacctgccgttcgagcaactggtggaagccttgcagccggagcgcaatgccagccacaacccactgttccaggtgctgttcaaccatcagagcgagatacgctcggtgacgcccgaggttcagttggaggacctgcgtctggaaggcctggcctgggacggccagactgcgcagttcgacctgacgctggatattcaggaagacgaaaacggcatctgggcctccttcgactatgccaccgatctgttcgacgcctccaccgtggaacgcctggccggccattggcgcaacctgttgcgcggcatcgtcgccaacccacgacagcggctcggcgagttgccgctgctggatgcgccggagcgccggcagaccctctccgaattgaaccagacgagcgcagagtacccgcaccatagttgtatacatgagttgtttgaacggcaggcggctgagacacctgaagcggtggcggtcgtcttcggcgaggaacaagtgagctatggagagttgaatgaaagggcgaaccgattagcacactacttacgagaaaagggagtgaagccggagtcacgtgtcggcttgctgctggagcgttcggtagagacgatagtgggtgtgctcggcatcctcaaagccgggggcgcatatgtcccccttgatccggaatacccgcaagagcgcctcgccttcatgctgacagactcaggcatcgaagtcgtcatcacacaggcagcgctgggcgagcgattgcgcgagcagccgcagttgcgcctgctgtgcctcgacaccgagggtgcgagcatcagtgcctacgccgacactgtgcttccgagcgatgcgacgccggacaatctggcctatgtcatctacaccagtggctcgaccggcaacccgaagggcgtgatgatccgtcacgcctcggccctcaacctgctgacggcgctgcgccagagcatctacagccagttgactgcgccgctgcgggtcagcgtcaacgcgccactgtcgttcgacgcctccgtcaagcaactcgtccaactgctggacgggcacacgctggtcatggtgcccgaagaggcgcggcgcgacggcgcggctttggtccagtacctggcacgccagcgcgtcgaagtgctcgactgcacgccttcacagttgcgcctgatgctcggggccgatgtgtccacagggccgctgggcggactgcgtgcggcgctcgtcggcggtgaagagttggacgagaggctgtggcgccaactgagcgagattaccgacattaccgggacagctttcttcaacgtctacggcccgaccgagtgtacggtggacgccaccgtctgccgcgtctctggccaggcgaggcgccccagcattggtcgcccgctggcgaatgtcagtgtctacgtgctggacaggaatctgctgccggtgccggtgggcgtggcggggcagttacacatcgggggcgaaggcgtggcgcggtgctacctgaaccgcccggagttgacggccgagaagttcatccccgatgggttgggcaaggtgccgggagcgagactctaccggacgggcgatctggtgcgatatctgcccgacggccagcttgaatatttgggtcgcagtgaccatcaggtgaaagtccgtggttatcgcatcgaactcggcgagattgaatcggctttgagtctccatccggctgtccgcgaggcggcggcaacggtgcgggcagacgaagctggtgacaagcgtttggtggcttacgtggtgtttgatgacgggcagacgccctcgactggtgagctgcgggcatacttgcaggcgcatttgcccgactacatgattccgcacctcttcgtcactcttgaggcactgccgttgaccgttaacggcaagatcgaccgtgaggcgttgccgcaaccggatgcggccgc

SEQ ID NO: 176 - protein, 977 aa, Artificial Sequence
  Description of Artificial Sequence: Synthetic polypeptide
SRTTDAVSTIPLADRQQPLALSFAQERQWFLWQLEPESAAYHIPSALRLRGRLDVDALQRSFDSLVARHETLRTRFRLEGGRSYQQVQPAVSVSIEREQFGEEGLIERIQAIVVQPFDLERGPLLRVNLLQLAEDDHVLVLVQHHIVSDGWSMQVMVEELVQLYAAYSQGLDVVLPALPIQYADYALWQRSWMEAGEKERQLAYWTGLLGGEQPVLELPFDRPRPARQSHRGAQLGFELSRELVEAVRALAQREGASSFMLLLASFQALLYRYSGQADIRVGVPIANRNRVETERLIGFFVNTQVLKADLDGRMGFDELLAQARQRALEAQAHQDLPFEQLVEALQPERNASHNPLFQVLFNHQSEIRSVTPEVQLEDLRLEGLAWDGQTAQFDLTLDIQEDENGIWASFDYATDLFDASTVERLAGHWRNLLRGIVANPRQRLGELPLLDAPERRQTLSELNQTSAEYPHHSCIHELFERQAAETPEAVAVVFGEEQVSYGELNERANRLAHYLREKGVKPESRVGLLLERSVETIVGVLGILKAGGAYVPLDPEYPQERLAFMLTDSGIEVVITQAALGERLREQPQLRLLCLDTEGASISAYADTVLPSDATPDNLAYVIYTSGSTGNPKGVMIRHASALNLLTALRQSIYSQLTAPLRVSVNAPLSFDASVKQLVQLLDGHTLVMVPEEARRDGAALVQYLARQRVEVLDCTPSQLRLMLGADVSTGPLGGLRAALVGGEELDERLWRQLSEITDITGTAFFNVYGPTECTVDATVCRVSGQARRPSIGRPLANVSVYVLDRNLLPVPVGVAGQLHIGGEGVARCYLNRPELTAEKFIPDGLGKVPGARLYRTGDLVRYLPDGQLEYLGRSDHQVKVRGYRIELGEIESALSLHPAVREAAATVRADEAGDKRLVAYVVFDDGQTPSTGELRAYLQAHLPDYMIPHLFVTLEALPLTVNGKIDREALPQPDAA

SEQ ID NO: 177 - DNA, 2948 bp, Artificial Sequence
  Description of Artificial Sequence: Synthetic polynucleotide
tctagaacgacggatgcggtctcgacgataccgcttgccgatcggcagcaaccgttggcactgtccttcgctcaggagcgtcagtggttcctctggcaactggagccggaaagcgcggcctaccatattccgagtgccttgcgcctacgcgggcggctggacgtggatgccttgcaacgcagcttcgacagcctggtcgcgcggcatgaaaccttgcgtacccgcttccggctggagggagggcgttcgtaccagcaggtacaacctgcggttagcgtttccatcgagcgggaacagttcggtgaagaaggcctgatcgaacggatacaggccatcgttgtgcagccattcgacctggaacgggggccgctgctgcgggtgaacctgttgcaactggccgaggacgaccatgtactggtgctggtccagcaccacatcgtgtccgatggttggtcgatgcaggtgatggtcgaggaactggtccagctctatgccgcctatagccaagggctcgacgtggtgttgccagccctgccgatccagtacgcggactacgccctgtggcagcgcagctggatggaggcgggggaaaaggagcgccagttggcgtactggaccggcctgctgggcggcgagcagccggtgctggagttgccgttcgatcggccgcgtccggcccggcagagccatcgtggcgcgcagttgggtttcgagctatcgcgggaactggtcgaggccgtgagagccttggcccagcgtgaaggcgccagtagtttcatgctgttgctggcctcgttccaggcgctgttgtatcgctacagcgggcaggcggatatccgtgtcggtgtgccgatcgccaatcgcaaccgcgtggagaccgagcggctgatcggcttcttcgtcaacacccaggtgctcaaggccgacctggacggtcggatgggcttcgacgagctgctggcccaggcccgccaacgcgcgctggaggcccaggcgcaccaggacctgccgttcgagcaactggtggaagccttgcagccggagcgcaatgccagccacaacccactgttccaggtgctgttcaaccatcagagcgagatacgctcggtgacgcccgaggttcagttggaggacctgcgtctggaaggcctggcctgggacggccagactgcgcagttcgacctgacgctggatattcaggaagacgaaaacggcatctgggcctccttcgactatgccaccgatctgttcgacgcctccaccgtggaacgcctggccggccattggcgcaacctgttgcgcggcatcgtcgccgatgtgcatcagccggtcgcccgcatcgatctgcttgccctgccagaacggaatctgctgctgcagacctggaacgatacccgcgccgactacccctatgagcaatgcgtccatcagctgttcgaggagcaggtccgcaagacgcccgaagccatcgcggtggtgcaggacgacattgagctgagctatgcccagctcaatgtccgggccaatcgtctagctcactacctgatcaaacaaggcgtgcgccccgatacccgcgtggcgatctgtgtcgagcgctccttcgccatggtgatcggcctgctcgccatcctcaaagccggtgggacgtacttgccgctggatccgacccatcccagcgagcggctcgtcgaactgctcgacgatgcgcagccggtagtgctgctcgccgatgcaactggcaggcgggcgctgggaactcatgtaccgaataccactacgacgctgtcgctggatgagccgctgccggcagacgcgcagagcgaagccacgacttcggccaatcccgtcccgcagcagttgggcctgacgtcgtcccatctggcctatgtcatctatacctctggctccaccggcaagcccaagggggtcatggtcgagcatcgtcagttggcatgccagatcacttcgctacgacgtcaatggcagttgacgaatgccgacagagttttgcaattcaacaacattgctttcgatgttgcgacttccgaaatatttggtgctttgatcagtggcgccaggctggtcctgcgtactgccgagtggctgtcaagtacgacaaaattctgggcactgtgcgaatcgttcggcatcacctatatcgatgtgccgactcagttctggagcaggctcgacgacgacgcgacacagcatctgccaccccgcttgaaagtcatttgcatcggtggcgaagcggcgccctctcaaaccgtgcgccgatggcttgagcgtcatccaggtcgcccggtactggcgaactgctatggcccaacggagacgacagtcactgcaaccgtgggctgtcctgaccgcaacgatagccaccacgtctcgatcggtcgcccgatcgccaacacccggatctatcttctggatggtcacggccagccggtaccgctgggcgcggtgggcgagatctacattggtggcgccggtgtggcacgcggttatctgaatcgtccgcagctgactgccgagcgtttcctgcaggatccgttctgcaacgagccgggtgcgcgcatgtaccgtaccggcgatctggcccgctaccgcgccaacggcaacatcgagtacctcggccgcgccgaccagcaggtgaagatccgcggtttccgcatcgagctgggtgagatcgaagcacgcctagccgcgcatgactcggtacgcgaagcggtggtgattgcccgcgaggatggcggcaacaagcgcctggtcgcctacgttacgccacggtcggatgcagccatcgaagtctccgcactgcgcgcacacctggcccggcagttaccggagtacatggtgccggccgccttcgtgcagatcgatgccctgccgctgacccccaacggcaaggtggaccgccaggcgttgccgcaaccggatgcggccgc

SEQ ID NO: 178 - protein, 982 aa, Artificial Sequence
  Description of Artificial Sequence: Synthetic polypeptide
SRTTDAVSTIPLADRQQPLALSFAQERQWFLWQLEPESAAYHIPSALRLRGRLDVDALQRSFDSLVARHETLRTRFRLEGGRSYQQVQPAVSVSIEREQFGEEGLIERIQAIVVQPFDLERGPLLRVNLLQLAEDDHVLVLVQHHIVSDGWSMQVMVEELVQLYAAYSQGLDVVLPALPIQYADYALWQRSWMEAGEKERQLAYWTGLLGGEQPVLELPFDRPRPARQSHRGAQLGFELSRELVEAVRALAQREGASSFMLLLASFQALLYRYSGQADIRVGVPIANRNRVETERLIGFFVNTQVLKADLDGRMGFDELLAQARQRALEAQAHQDLPFEQLVEALQPERNASHNPLFQVLFNHQSEIRSVTPEVQLEDLRLEGLAWDGQTAQFDLTLDIQEDENGIWASFDYATDLFDASTVERLAGHWRNLLRGIVADVHQPVARIDLLALPERNLLLQTWNDTRADYPYEQCVHQLFEEQVRKTPEAIAVVQDDIELSYAQLNVRANRLAHYLIKQGVRPDTRVAICVERSFAMVIGLLAILKAGGTYLPLDPTHPSERLVELLDDAQPVVLLADATGRRALGTHVPNTTTTLSLDEPLPADAQSEATTSANPVPQQLGLTSSHLAYVIYTSGSTGKPKGVMVEHRQLACQITSLRRQWQLTNADRVLQFNNIAFDVATSEIFGALISGARLVLRTAEWLSSTTKFWALCESFGITYIDVPTQFWSRLDDDATQHLPPRLKVICIGGEAAPSQTVRRWLERHPGRPVLANCYGPTETTVTATVGCPDRNDSHHVSIGRPIANTRIYLLDGHGQPVPLGAVGEIYIGGAGVARGYLNRPQLTAERFLQDPFCNEPGARMYRTGDLARYRANGNIEYLGRADQQVKIRGFRIELGEIEARLAAHDSVREAVVIAREDGGNKRLVAYVTPRSDAAIEVSALRAHLARQLPEYMVPAAFVQIDALPLTPNGKVDRQALPQPDAA

SEQ ID NO: 179 - DNA, 2948 bp, Artificial Sequence
  Description of Artificial Sequence: Synthetic polynucleotide
tctagaacgacggatgcggtctcgacgataccgcttgccgatcggcagcaaccgttggcactgtccttcgctcaggagcgtcagtggttcctctggcaactggagccggaaagcgcggcctaccatattccgagtgccttgcgcctacgcgggcggctggacgtggatgccttgcaacgcagcttcgacagcctggtcgcgcggcatgaaaccttgcgtacccgcttccggctggagggagggcgttcgtaccagcaggtacaacctgcggttagcgtttccatcgagcgggaacagttcggtgaagaaggcctgatcgaacggatacaggccatcgttgtgcagccattcgacctggaacgggggccgctgctgcgggtgaacctgttgcaactggccgaggacgaccatgtactggtgctggtccagcaccacatcgtgtccgatggttggtcgatgcaggtgatggtcgaggaactggtccagctctatgccgcctatagccaagggctcgacgtggtgttgccagccctgccgatccagtacgcggactacgccctgtggcagcgcagctggatggaggcgggggaaaaggagcgccagttggcgtactggaccggcctgctgggcggcgagcagccggtgctggagttgccgttcgatcggccgcgtccggcccggcagagccatcgtggcgcgcagttgggtttcgagctatcgcgggaactggtcgaggccgtgagagccttggcccagcgtgaaggcgccagtagtttcatgctgttgctggcctcgttccaggcgctgttgtatcgctacagcgggcaggcggatatccgtgtcggtgtgccgatcgccaatcgcaaccgcgtggagaccgagcggctgatcggcttcttcgtcaacacccaggtgctcaaggccgacctggacggtcggatgggcttcgacgagctgctggcccaggcccgccaacgcgcgctggaggcccaggcgcaccaggacctgccgttcgagcaactggtggaagccttgcagccggagcgcaatgccagccacaacccactgttccaggtgctgttcaaccatcagagcgagatacgctcggtgacgcccgaggttcagttggaggacctgcgtctggaaggcctggcctgggacggccagactgcgcagttcgacctgacgctggatattcaggaagacgaaaacggcatctgggcctccttcgactatgccaccgatctgttcgacgcctccaccgtggaacgcctggccggccattggcgcaacctgttgcgcggcatcgtcgccaacccacgacagcggctcggcgagttgccgctgctggatctgccagaacggaatctgctgctgcagacctggaacgatacccgcgccgactacccctatgagcaatgcgtccatcagctgttcgaggagcaggtccgcaagacgcccgaagccatcgcggtggtgcaggacgacattgagctgagctatgcccagctcaatgtccgggccaatcgtctagctcactacctgatcaaacaaggcgtgcgccccgatacccgcgtggcgatctgtgtcgagcgctccttcgccatggtgatcggcctgctcgccatcctcaaagccggtgggacgtacttgccgctggatccgacccatcccagcgagcggctcgtcgaactgctcgacgatgcgcagccggtagtgctgctcgccgatgcaactggcaggcgggcgctgggaactcatgtaccgaataccactacgacgctgtcgctggatgagccgctgccggcagacgcgcagagcgaagccacgacttcggccaatcccgtcccgcagcagttgggcctgacgtcgtcccatctggcctatgtcatctatacctctggctccaccggcaagcccaagggggtcatggtcgagcatcgtcagttggcatgccagatcacttcgctacgacgtcaatggcagttgacgaatgccgacagagttttgcaattcaacaacattgctttcgatgttgcgacttccgaaatatttggtgctttgatcagtggcgccaggctggtcctgcgtactgccgagtggctgtcaagtacgacaaaattctgggcactgtgcgaatcgttcggcatcacctatatcgatgtgccgactcagttctggagcaggctcgacgacgacgcgacacagcatctgccaccccgcttgaaagtcatttgcatcggtggcgaagcggcgccctctcaaaccgtgcgccgatggcttgagcgtcatccaggtcgcccggtactggcgaactgctatggcccaacggagacgacagtcactgcaaccgtgggctgtcctgaccgcaacgatagccaccacgtctcgatcggtcgcccgatcgccaacacccggatctatcttctggatggtcacggccagccggtaccgctgggcgcggtgggcgagatctacattggtggcgccggtgtggcacgcggttatctgaatcgtccgcagctgactgccgagcgtttcctgcaggatccgttctgcaacgagccgggtgcgcgcatgtaccgtaccggcgatctggcccgctaccgcgccaacggcaacatcgagtacctcggccgcgccgaccagcaggtgaagatccgcggtttccgcatcgagctgggtgagatcgaagcacgcctagccgcgcatgactcggtacgcgaagcggtggtgattgcccgcgaggatggcggcaacaagcgcctggtcgcctacgttacgccacggtcggatgcagccatcgaagtctccgcactgcgcgcacacctggcccggcagttaccggagtacatggtgccggccgccttcgtgcagatcgatgccctgccgctgacccccaacggcaaggtggaccgccaggcgttgccgcaaccggatgcggccgc

SEQ ID NO: 180 - protein, 982 aa, Artificial Sequence
  Description of Artificial Sequence: Synthetic polypeptide
SRTTDAVSTIPLADRQQPLALSFAQERQWFLWQLEPESAAYHIPSALRLRGRLDVDALQRSFDSLVARHETLRTRFRLEGGRSYQQVQPAVSVSIEREQFGEEGLIERIQAIVVQPFDLERGPLLRVNLLQLAEDDHVLVLVQHHIVSDGWSMQVMVEELVQLYAAYSQGLDVVLPALPIQYADYALWQRSWMEAGEKERQLAYWTGLLGGEQPVLELPFDRPRPARQSHRGAQLGFELSRELVEAVRALAQREGASSFMLLLASFQALLYRYSGQADIRVGVPIANRNRVETERLIGFFVNTQVLKADLDGRMGFDELLAQARQRALEAQAHQDLPFEQLVEALQPERNASHNPLFQVLFNHQSEIRSVTPEVQLEDLRLEGLAWDGQTAQFDLTLDIQEDENGIWASFDYATDLFDASTVERLAGHWRNLLRGIVANPRQRLGELPLLDLPERNLLLQTWNDTRADYPYEQCVHQLFEEQVRKTPEAIAVVQDDIELSYAQLNVRANRLAHYLIKQGVRPDTRVAICVERSFAMVIGLLAILKAGGTYLPLDPTHPSERLVELLDDAQPVVLLADATGRRALGTHVPNTTTTLSLDEPLPADAQSEATTSANPVPQQLGLTSSHLAYVIYTSGSTGKPKGVMVEHRQLACQITSLRRQWQLTNADRVLQFNNIAFDVATSEIFGALISGARLVLRTAEWLSSTTKFWALCESFGITYIDVPTQFWSRLDDDATQHLPPRLKVICIGGEAAPSQTVRRWLERHPGRPVLANCYGPTETTVTATVGCPDRNDSHHVSIGRPIANTRIYLLDGHGQPVPLGAVGEIYIGGAGVARGYLNRPQLTAERFLQDPFCNEPGARMYRTGDLARYRANGNIEYLGRADQQVKIRGFRIELGEIEARLAAHDSVREAVVIAREDGGNKRLVAYVTPRSDAAIEVSALRAHLARQLPEYMVPAAFVQIDALPLTPNGKVDRQALPQPDAA

SEQ ID NO: 181 - DNA, 2948 bp, Artificial Sequence
  Description of Artificial Sequence: Synthetic polynucleotide
tctagaacgacggatgcggtctcgacgataccgcttgccgatcggcagcaaccgttggcactgtccttcgctcaggagcgtcagtggttcctctggcaactggagccggaaagcgcggcctaccatattccgagtgccttgcgcctacgcgggcggctggacgtggatgccttgcaacgcagcttcgacagcctggtcgcgcggcatgaaaccttgcgtacccgcttccggctggagggagggcgttcgtaccagcaggtacaacctgcggttagcgtttccatcgagcgggaacagttcggtgaagaaggcctgatcgaacggatacaggccatcgttgtgcagccattcgacctggaacgggggccgctgctgcgggtgaacctgttgcaactggccgaggacgaccatgtactggtgctggtccagcaccacatcgtgtccgatggttggtcgatgcaggtgatggtcgaggaactggtccagctctatgccgcctatagccaagggctcgacgtggtgttgccagccctgccgatccagtacgcggactacgccctgtggcagcgcagctggatggaggcgggggaaaaggagcgccagttggcgtactggaccggcctgctgggcggcgagcagccggtgctggagttgccgttcgatcggccgcgtccggcccggcagagccatcgtggcgcgcagttgggtttcgagctatcgcgggaactggtcgaggccgtgagagccttggcccagcgtgaaggcgccagtagtttcatgctgttgctggcctcgttccaggcgctgttgtatcgctacagcgggcaggcggatatccgtgtcggtgtgccgatcgccaatcgcaaccgcgtggagaccgagcggctgatcggcttcttcgtcaacacccaggtgctcaaggccgacctggacggtcggatgggcttcgacgagctgctggcccaggcccgccaacgcgcgctggaggcccaggcgcaccaggacctgccgttcgagcaactggtggaagccttgcagccggagcgcaatgccagccacaacccactgttccaggtgctgttcaaccatcagagcgagatacgctcggtgacgcccgaggttcagttggaggacctgcgtctggaaggcctggcctgggacggccagactgcgcagttcgacctgacgctggatattcaggaagacgaaaacggcatctgggcctccttcgactatgccaccgatctgttcgacgcctccaccgtggaacgcctggccggccattggcgcaacctgttgcgcggcatcgtcgccaacccacgacagcggctcggcgagttgccgctgctggatgcgccggagcgccggcagaccctctccgaatggaacgatacccgcgccgactacccctatgagcaatgcgtccatcagctgttcgaggagcaggtccgcaagacgcccgaagccatcgcggtggtgcaggacgacattgagctgagctatgcccagctcaatgtccgggccaatcgtctagctcactacctgatcaaacaaggcgtgcgccccgatacccgcgtggcgatctgtgtcgagcgctccttcgccatggtgatcggcctgctcgccatcctcaaagccggtgggacgtacttgccgctggatccgacccatcccagcgagcggctcgtcgaactgctcgacgatgcgcagccggtagtgctgctcgccgatgcaactggcaggcgggcgctgggaactcatgtaccgaataccactacgacgctgtcgctggatgagccgctgccggcagacgcgcagagcgaagccacgacttcggccaatcccgtcccgcagcagttgggcctgacgtcgtcccatctggcctatgtcatctatacctctggctccaccggcaagcccaagggggtcatggtcgagcatcgtcagttggcatgccagatcacttcgctacgacgtcaatggcagttgacgaatgccgacagagttttgcaattcaacaacattgctttcgatgttgcgacttccgaaatatttggtgctttgatcagtggcgccaggctggtcctgcgtactgccgagtggctgtcaagtacgacaaaattctgggcactgtgcgaatcgttcggcatcacctatatcgatgtgccgactcagttctggagcaggctcgacgacgacgcgacacagcatctgccaccccgcttgaaagtcatttgcatcggtggcgaagcggcgccctctcaaaccgtgcgccgatggcttgagcgtcatccaggtcgcccggtactggcgaactgctatggcccaacggagacgacagtcactgcaaccgtgggctgtcctgaccgcaacgatagccaccacgtctcgatcggtcgcccgatcgccaacacccggatctatcttctggatggtcacggccagccggtaccgctgggcgcggtgggcgagatctacattggtggcgccggtgtggcacgcggttatctgaatcgtccgcagctgactgccgagcgtttcctgcaggatccgttctgcaacgagccgggtgcgcgcatgtaccgtaccggcgatctggcccgctaccgcgccaacggcaacatcgagtacctcggccgcgccgaccagcaggtgaagatccgcggtttccgcatcgagctgggtgagatcgaagcacgcctagccgcgcatgactcggtacgcgaagcggtggtgattgcccgcgaggatggcggcaacaagcgcctggtcgcctacgttacgccacggtcggatgcagccatcgaagtctccgcactgcgcgcacacctggcccggcagttaccggagtacatggtgccggccgccttcgtgcagatcgatgccctgccgctgacccccaacggcaaggtggaccgccaggcgttgccgcaaccggatgcggccgc

SEQ ID NO: 182 - protein, 982 aa, Artificial Sequence
  Description of Artificial Sequence: Synthetic polypeptide
SRTTDAVSTIPLADRQQPLALSFAQERQWFLWQLEPESAAYHIPSALRLRGRLDVDALQRSFDSLVARHETLRTRFRLEGGRSYQQVQPAVSVSIEREQFGEEGLIERIQAIVVQPFDLERGPLLRVNLLQLAEDDHVLVLVQHHIVSDGWSMQVMVEELVQLYAAYSQGLDVVLPALPIQYADYALWQRSWMEAGEKERQLAYWTGLLGGEQPVLELPFDRPRPARQSHRGAQLGFELSRELVEAVRALAQREGASSFMLLLASFQALLYRYSGQADIRVGVPIANRNRVETERLIGFFVNTQVLKADLDGRMGFDELLAQARQRALEAQAHQDLPFEQLVEALQPERNASHNPLFQVLFNHQSEIRSVTPEVQLEDLRLEGLAWDGQTAQFDLTLDIQEDENGIWASFDYATDLFDASTVERLAGHWRNLLRGIVANPRQRLGELPLLDAPERRQTLSEWNDTRADYPYEQCVHQLFEEQVRKTPEAIAVVQDDIELSYAQLNVRANRLAHYLIKQGVRPDTRVAICVERSFAMVIGLLAILKAGGTYLPLDPTHPSERLVELLDDAQPVVLLADATGRRALGTHVPNTTTTLSLDEPLPADAQSEATTSANPVPQQLGLTSSHLAYVIYTSGSTGKPKGVMVEHRQLACQITSLRRQWQLTNADRVLQFNNIAFDVATSEIFGALISGARLVLRTAEWLSSTTKFWALCESFGITYIDVPTQFWSRLDDDATQHLPPRLKVICIGGEAAPSQTVRRWLERHPGRPVLANCYGPTETTVTATVGCPDRNDSHHVSIGRPIANTRIYLLDGHGQPVPLGAVGEIYIGGAGVARGYLNRPQLTAERFLQDPFCNEPGARMYRTGDLARYRANGNIEYLGRADQQVKIRGFRIELGEIEARLAAHDSVREAVVIAREDGGNKRLVAYVTPRSDAAIEVSALRAHLARQLPEYMVPAAFVQIDALPLTPNGKVDRQALPQPDAA

SEQ ID NO: 183 - DNA, 2930 bp, Artificial Sequence
  Description of Artificial Sequence: Synthetic polynucleotide
tctagaacgacggatgcggtctcgacgataccgcttgccgatcggcagcaaccgttggcactgtccttcgctcaggagcgtcagtggttcctctggcaactggagccggaaagcgcggcctaccatattccgagtgccttgcgcctacgcgggcggctggacgtggatgccttgcaacgcagcttcgacagcctggtcgcgcggcatgaaaccttgcgtacccgcttccggctggagggagggcgttcgtaccagcaggtacaacctgcggttagcgtttccatcgagcgggaacagttcggtgaagaaggcctgatcgaacggatacaggccatcgttgtgcagccattcgacctggaacgggggccgctgctgcgggtgaacctgttgcaactggccgaggacgaccatgtactggtgctggtccagcaccacatcgtgtccgatggttggtcgatgcaggtgatggtcgaggaactggtccagctctatgccgcctatagccaagggctcgacgtggtgttgccagccctgccgatccagtacgcggactacgccctgtggcagcgcagctggatggaggcgggggaaaaggagcgccagttggcgtactggaccggcctgctgggcggcgagcagccggtgctggagttgccgttcgatcggccgcgtccggcccggcagagccatcgtggcgcgcagttgggtttcgagctatcgcgggaactggtcgaggccgtgagagccttggcccagcgtgaaggcgccagtagtttcatgctgttgctggcctcgttccaggcgctgttgtatcgctacagcgggcaggcggatatccgtgtcggtgtgccgatcgccaatcgcaaccgcgtggagaccgagcggctgatcggcttcttcgtcaacacccaggtgctcaaggccgacctggacggtcggatgggcttcgacgagctgctggcccaggcccgccaacgcgcgctggaggcccaggcgcaccaggacctgccgttcgagcaactggtggaagccttgcagccggagcgcaatgccagccacaacccactgttccaggtgctgttcaaccatcagagcgagatacgctcggtgacgcccgaggttcagttggaggacctgcgtctggaaggcctggcctgggacggccagactgcgcagttcgacctgacgctggatattcaggaagacgaaaacggcatctgggcctccttcgactatgccaccgatctgttcgacgcctccaccgtggaacgcctggccggccattggcgcaacctgttgcgcggcatcgtcgccaatccgtccagtcccatcagggacctggtgctgcttgacgatagcgaacatgcgcaactggtactcggctggaacgcgacggcagcacccttgcccgaatgcacgcttcatcagctgttcgaacaacaggcgcgacgcgcgccggatcgcatcgccgtcgtggatgggcacacggagctgacctatgcggaactgaacgcgaaggccaatcgcctggcccatcatttgcggtcgctcggcgtcggtcccgatgtgctggtggcgctgtgcatggaacgcagcgcggacttgctggtcgggctgctcgcggtactcaaggctgggggcgcctacctgccgctggacccggcatatccggccgcccgcctggcttacatgctcgatgacgccatgccggccgtgttgttgaccgaatcgcgctggctgacgcacttgtcgtcgcaccaggttccggtatgctgcctggaccgcgaatggccatcgctggcccgctttcccgacagcgatccgcccgccgctgccatgccgcccaatgtggcctatgtcatctatacctcgggctcgaccggtaatcccaaaggcgtgctgacgacccaccgcaatgtggtgaaccagctgctcggccatgcccggctctgtgaattgtcggactcggatcgtgtgctgcaattcgcatcgattggctttgacgtatcggtggaagaaatctttgccacgctgctggccggcgcgaccctggtcttgcgttccgaagaactgctcgagggcggcgccgtgttttccgaatgggtatcgcgccatgctctcaccgtgctcgacctgccgaccgcattctggcatgaatgggtgcggtgtctggacgagggcgaggctttcctgccgcccatgctgcggctggtcgtaatcggcggagaaaaggcccgcgccgatgcggcccatgcctggctcaggctgacgcaggcacgcccgatccgcctgatcaatgcttatgggccgaccgaaacgaccgtaggcgtcaccgcctatgaactgccgccggacttcaccgggctggacattccaatcggcaggccgtgcccgaatacccagctctacatattggacacggaacagcagccagtgcccatcggcgcatgcggcgagctgtatatcgccggcgccggggtggcgcgcggctacctgcgcaggcccggcctgacgggcgaaaaattcgtcgccaatccgttcgatgcgggtacgcgcatgtaccgaagcggcgatctggtgcgttatctcccggatgggaatattgtctacctcgggcgaatcgacgagcaggtcaagatccgcggattccgtatcgagcctggagagatcgaagctggcttgatggcgttggagggtgtgcggcaagccgttgtcgttacgcgcgaagattccccgggtaacaggcgtctggcagcgtatgtggtggcacaggacggcgcagtggttcaagccgccaagctacgcgctggtctgcaagctcgcttgcccgaatatatggtgccaacccatattctcctgctcggccaattgccgctgacgcccaacggcaagatggaccgtaaggcgttgccgcaaccggatgcggccgc

SEQ ID NO: 184 - protein, 976 aa, Artificial Sequence
  Description of Artificial Sequence: Synthetic polypeptide
SRTTDAVSTIPLADRQQPLALSFAQERQWFLWQLEPESAAYHIPSALRLRGRLDVDALQRSFDSLVARHETLRTRFRLEGGRSYQQVQPAVSVSIEREQFGEEGLIERIQAIVVQPFDLERGPLLRVNLLQLAEDDHVLVLVQHHIVSDGWSMQVMVEELVQLYAAYSQGLDVVLPALPIQYADYALWQRSWMEAGEKERQLAYWTGLLGGEQPVLELPFDRPRPARQSHRGAQLGFELSRELVEAVRALAQREGASSFMLLLASFQALLYRYSGQADIRVGVPIANRNRVETERLIGFFVNTQVLKADLDGRMGFDELLAQARQRALEAQAHQDLPFEQLVEALQPERNASHNPLFQVLFNHQSEIRSVTPEVQLEDLRLEGLAWDGQTAQFDLTLDIQEDENGIWASFDYATDLFDASTVERLAGHWRNLLRGIVANPSSPIRDLVLLDDSEHAQLVLGWNATAAPLPECTLHQLFEQQARRAPDRIAVVDGHTELTYAELNAKANRLAHHLRSLGVGPDVLVALCMERSADLLVGLLAVLKAGGAYLPLDPAYPAARLAYMLDDAMPAVLLTESRWLTHLSSHQVPVCCLDREWPSLARFPDSDPPAAAMPPNVAYVIYTSGSTGNPKGVLTTHRNVVNQLLGHARLCELSDSDRVLQFASIGFDVSVEEIFATLLAGATLVLRSEELLEGGAVFSEWVSRHALTVLDLPTAFWHEWVRCLDEGEAFLPPMLRLVVIGGEKARADAAHAWLRLTQARPIRLINAYGPTETTVGVTAYELPPDFTGLDIPIGRPCPNTQLYILDTEQQPVPIGACGELYIAGAGVARGYLRRPGLTGEKFVANPFDAGTRMYRSGDLVRYLPDGNIVYLGRIDEQVKIRGFRIEPGEIEAGLMALEGVRQAVVVTREDSPGNRRLAAYVVAQDGAVVQAAKLRAGLQARLPEYMVPTHILLLGQLPLTPNGKMDRKALPQPDAA

SEQ ID NO: 185 - DNA, 2930 bp, Artificial Sequence
  Description of Artificial Sequence: Synthetic polynucleotide
tctagaacgacggatgcggtctcgacgataccgcttgccgatcggcagcaaccgttggcactgtccttcgctcaggagcgtcagtggttcctctggcaactggagccggaaagcgcggcctaccatattccgagtgccttgcgcctacgcgggcggctggacgtggatgccttgcaacgcagcttcgacagcctggtcgcgcggcatgaaaccttgcgtacccgcttccggctggagggagggcgttcgtaccagcaggtacaacctgcggttagcgtttccatcgagcgggaacagttcggtgaagaaggcctgatcgaacggatacaggccatcgttgtgcagccattcgacctggaacgggggccgctgctgcgggtgaacctgttgcaactggccgaggacgaccatgtactggtgctggtccagcaccacatcgtgtccgatggttggtcgatgcaggtgatggtcgaggaactggtccagctctatgccgcctatagccaagggctcgacgtggtgttgccagccctgccgatccagtacgcggactacgccctgtggcagcgcagctggatggaggcgggggaaaaggagcgccagttggcgtactggaccggcctgctgggcggcgagcagccggtgctggagttgccgttcgatcggccgcgtccggcccggcagagccatcgtggcgcgcagttgggtttcgagctatcgcgggaactggtcgaggccgtgagagccttggcccagcgtgaaggcgccagtagtttcatgctgttgctggcctcgttccaggcgctgttgtatcgctacagcgggcaggcggatatccgtgtcggtgtgccgatcgccaatcgcaaccgcgtggagaccgagcggctgatcggcttcttcgtcaacacccaggtgctcaaggccgacctggacggtcggatgggcttcgacgagctgctggcccaggcccgccaacgcgcgctggaggcccaggcgcaccaggacctgccgttcgagcaactggtggaagccttgcagccggagcgcaatgccagccacaacccactgttccaggtgctgttcaaccatcagagcgagatacgctcggtgacgcccgaggttcagttggaggacctgcgtctggaaggcctggcctgggacggccagactgcgcagttcgacctgacgctggatattcaggaagacgaaaacggcatctgggcctccttcgactatgccaccgatctgttcgacgcctccaccgtggaacgcctggccggccattggcgcaacctgttgcgcggcatcgtcgccaacccacgacagcggctcggcgagttgccgctgctggatgatagcgaacatgcgcaactggtactcggctggaacgcgacggcagcacccttgcccgaatgcacgcttcatcagctgttcgaacaacaggcgcgacgcgcgccggatcgcatcgccgtcgtggatgggcacacggagctgacctatgcggaactgaacgcgaaggccaatcgcctggcccatcatttgcggtcgctcggcgtcggtcccgatgtgctggtggcgctgtgcatggaacgcagcgcggacttgctggtcgggctgctcgcggtactcaaggctgggggcgcctacctgccgctggacccggcatatccggccgcccgcctggcttacatgctcgatgacgccatgccggccgtgttgttgaccgaatcgcgctggctgacgcacttgtcgtcgcaccaggttccggtatgctgcctggaccgcgaatggccatcgctggcccgctttcccgacagcgatccgcccgccgctgccatgccgcccaatgtggcctatgtcatctatacctcgggctcgaccggtaatcccaaaggcgtgctgacgacccaccgcaatgtggtgaaccagctgctcggccatgcccggctctgtgaattgtcggactcggatcgtgtgctgcaattcgcatcgattggctttgacgtatcggtggaagaaatctttgccacgctgctggccggcgcgaccctggtcttgcgttccgaagaactgctcgagggcggcgccgtgttttccgaatgggtatcgcgccatgctctcaccgtgctcgacctgccgaccgcattctggcatgaatgggtgcggtgtctggacgagggcgaggctttcctgccgcccatgctgcggctggtcgtaatcggcggagaaaaggcccgcgccgatgcggcccatgcctggctcaggctgacgcaggcacgcccgatccgcctgatcaatgcttatgggccgaccgaaacgaccgtaggcgtcaccgcctatgaactgccgccggacttcaccgggctggacattccaatcggcaggccgtgcccgaatacccagctctacatattggacacggaacagcagccagtgcccatcggcgcatgcggcgagctgtatatcgccggcgccggggtggcgcgcggctacctgcgcaggcccggcctgacgggcgaaaaattcgtcgccaatccgttcgatgcgggtacgcgcatgtaccgaagcggcgatctggtgcgttatctcccggatgggaatattgtctacctcgggcgaatcgacgagcaggtcaagatccgcggattccgtatcgagcctggagagatcgaagctggcttgatggcgttggagggtgtgcggcaagccgttgtcgttacgcgcgaagattccccgggtaacaggcgtctggcagcgtatgtggtggcacaggacggcgcagtggttcaagccgccaagctacgcgctggtctgcaagctcgcttgcccgaatatatggtgccaacccatattctcctgctcggccaattgccgctgacgcccaacggcaagatggaccgtaaggcgttgccgcaaccggatgcggccgc

SEQ ID NO: 186 - protein, 976 aa, Artificial Sequence
  Description of Artificial Sequence: Synthetic polypeptide
SRTTDAVSTIPLADRQQPLALSFAQERQWFLWQLEPESAAYHIPSALRLRGRLDVDALQRSFDSLVARHETLRTRFRLEGGRSYQQVQPAVSVSIEREQFGEEGLIERIQAIVVQPFDLERGPLLRVNLLQLAEDDHVLVLVQHHIVSDGWSMQVMVEELVQLYAAYSQGLDVVLPALPIQYADYALWQRSWMEAGEKERQLAYWTGLLGGEQPVLELPFDRPRPARQSHRGAQLGFELSRELVEAVRALAQREGASSFMLLLASFQALLYRYSGQADIRVGVPIANRNRVETERLIGFFVNTQVLKADLDGRMGFDELLAQARQRALEAQAHQDLPFEQLVEALQPERNASHNPLFQVLFNHQSEIRSVTPEVQLEDLRLEGLAWDGQTAQFDLTLDIQEDENGIWASFDYATDLFDASTVERLAGHWRNLLRGIVANPRQRLGELPLLDDSEHAQLVLGWNATAAPLPECTLHQLFEQQARRAPDRIAVVDGHTELTYAELNAKANRLAHHLRSLGVGPDVLVALCMERSADLLVGLLAVLKAGGAYLPLDPAYPAARLAYMLDDAMPAVLLTESRWLTHLSSHQVPVCCLDREWPSLARFPDSDPPAAAMPPNVAYVIYTSGSTGNPKGVLTTHRNVVNQLLGHARLCELSDSDRVLQFASIGFDVSVEEIFATLLAGATLVLRSEELLEGGAVFSEWVSRHALTVLDLPTAFWHEWVRCLDEGEAFLPPMLRLVVIGGEKARADAAHAWLRLTQARPIRLINAYGPTETTVGVTAYELPPDFTGLDIPIGRPCPNTQLYILDTEQQPVPIGACGELYIAGAGVARGYLRRPGLTGEKFVANPFDAGTRMYRSGDLVRYLPDGNIVYLGRIDEQVKIRGFRIEPGEIEAGLMALEGVRQAVVVTREDSPGNRRLAAYVVAQDGAVVQAAKLRAGLQARLPEYMVPTHILLLGQLPLTPNGKMDRKALPQPDAA

SEQ ID NO: 187 - DNA, 2930 bp, Artificial Sequence
  Description of Artificial Sequence: Synthetic polynucleotide
tctagaacgacggatgcggtctcgacgataccgcttgccgatcggcagcaaccgttggcactgtccttcgctcaggagcgtcagtggttcctctggcaactggagccggaaagcgcggcctaccatattccgagtgccttgcgcctacgcgggcggctggacgtggatgccttgcaacgcagcttcgacagcctggtcgcgcggcatgaaaccttgcgtacccgcttccggctggagggagggcgttcgtaccagcaggtacaacctgcggttagcgtttccatcgagcgggaacagttcggtgaagaaggcctgatcgaacggatacaggccatcgttgtgcagccattcgacctggaacgggggccgctgctgcgggtgaacctgttgcaactggccgaggacgaccatgtactggtgctggtccagcaccacatcgtgtccgatggttggtcgatgcaggtgatggtcgaggaactggtccagctctatgccgcctatagccaagggctcgacgtggtgttgccagccctgccgatccagtacgcggactacgccctgtggcagcgcagctggatggaggcgggggaaaaggagcgccagttggcgtactggaccggcctgctgggcggcgagcagccggtgctggagttgccgttcgatcggccgcgtccggcccggcagagccatcgtggcgcgcagttgggtttcgagctatcgcgggaactggtcgaggccgtgagagccttggcccagcgtgaaggcgccagtagtttcatgctgttgctggcctcgttccaggcgctgttgtatcgctacagcgggcaggcggatatccgtgtcggtgtgccgatcgccaatcgcaaccgcgtggagaccgagcggctgatcggcttcttcgtcaacacccaggtgctcaaggccgacctggacggtcggatgggcttcgacgagctgctggcccaggcccgccaacgcgcgctggaggcccaggcgcaccaggacctgccgttcgagcaactggtggaagccttgcagccggagcgcaatgccagccacaacccactgttccaggtgctgttcaaccatcagagcgagatacgctcggtgacgcccgaggttcagttggaggacctgcgtctggaaggcctggcctgggacggccagactgcgcagttcgacctgacgctggatattcaggaagacgaaaacggcatctgggcctccttcgactatgccaccgatctgttcgacgcctccaccgtggaacgcctggccggccattggcgcaacctgttgcgcggcatcgtcgccaacccacgacagcggctcggcgagttgccgctgctggatgcgccggagcgccggcagaccctctccgaatggaacgcgacggcagcacccttgcccgaatgcacgcttcatcagctgttcgaacaacaggcgcgacgcgcgccggatcgcatcgccgtcgtggatgggcacacggagctgacctatgcggaactgaacgcgaaggccaatcgcctggcccatcatttgcggtcgctcggcgtcggtcccgatgtgctggtggcgctgtgcatggaacgcagcgcggacttgctggtcgggctgctcgcggtactcaaggctgggggcgcctacctgccgctggacccggcatatccggccgcccgcctggcttacatgctcgatgacgccatgccggccgtgttgttgaccgaatcgcgctggctgacgcacttgtcgtcgcaccaggttccggtatgctgcctggaccgcgaatggccatcgctggcccgctttcccgacagcgatccgcccgccgctgccatgccgcccaatgtggcctatgtcatctatacctcgggctcgaccggtaatcccaaaggcgtgctgacgacccaccgcaatgtggtgaaccagctgctcggccatgcccggctctgtgaattgtcggactcggatcgtgtgctgcaattcgcatcgattggctttgacgtatcggtggaagaaatctttgccacgctgctggccggcgcgaccctggtcttgcgttccgaagaactgctcgagggcggcgccgtgttttccgaatgggtatcgcgccatgctctcaccgtgctcgacctgccgaccgcattctggcatgaatgggtgcggtgtctggacgagggcgaggctttcctgccgcccatgctgcggctggtcgtaatcggcggagaaaaggcccgcgccgatgcggcccatgcctggctcaggctgacgcaggcacgcccgatccgcctgatcaatgcttatgggccgaccgaaacgaccgtaggcgtcaccgcctatgaactgccgccggacttcaccgggctggacattccaatcggcaggccgtgcccgaatacccagctctacatattggacacggaacagcagccagtgcccatcggcgcatgcggcgagctgtatatcgccggcgccggggtggcgcgcggctacctgcgcaggcccggcctgacgggcgaaaaattcgtcgccaatccgttcgatgcgggtacgcgcatgtaccgaagcggcgatctggtgcgttatctcccggatgggaatattgtctacctcgggcgaatcgacgagcaggtcaagatccgcggattccgtatcgagcctggagagatcgaagctggcttgatggcgttggagggtgtgcggcaagccgttgtcgttacgcgcgaagattccccgggtaacaggcgtctggcagcgtatgtggtggcacaggacggcgcagtggttcaagccgccaagctacgcgctggtctgcaagctcgcttgcccgaatatatggtgccaacccatattctcctgctcggccaattgccgctgacgcccaacggcaagatggaccgtaaggcgttgccgcaaccggatgcggccgc

SEQ ID NO: 188 - protein, 976 aa, Artificial Sequence
  Description of Artificial Sequence: Synthetic polypeptide
SRTTDAVSTIPLADRQQPLALSFAQERQWFLWQLEPESAAYHIPSALRLRGRLDVDALQRSFDSLVARHETLRTRFRLEGGRSYQQVQPAVSVSIEREQFGEEGLIERIQAIVVQPFDLERGPLLRVNLLQLAEDDHVLVLVQHHIVSDGWSMQVMVEELVQLYAAYSQGLDVVLPALPIQYADYALWQRSWMEAGEKERQLAYWTGLLGGEQPVLELPFDRPRPARQSHRGAQLGFELSRELVEAVRALAQREGASSFMLLLASFQALLYRYSGQADIRVGVPIANRNRVETERLIGFFVNTQVLKADLDGRMGFDELLAQARQRALEAQAHQDLPFEQLVEALQPERNASHNPLFQVLFNHQSEIRSVTPEVQLEDLRLEGLAWDGQTAQFDLTLDIQEDENGIWASFDYATDLFDASTVERLAGHWRNLLRGIVANPRQRLGELPLLDAPERRQTLSEWNATAAPLPECTLHQLFEQQARRAPDRIAVVDGHTELTYAELNAKANRLAHHLRSLGVGPDVLVALCMERSADLLVGLLAVLKAGGAYLPLDPAYPAARLAYMLDDAMPAVLLTESRWLTHLSSHQVPVCCLDREWPSLARFPDSDPPAAAMPPNVAYVIYTSGSTGNPKGVLTTHRNVVNQLLGHARLCELSDSDRVLQFASIGFDVSVEEIFATLLAGATLVLRSEELLEGGAVFSEWVSRHALTVLDLPTAFWHEWVRCLDEGEAFLPPMLRLVVIGGEKARADAAHAWLRLTQARPIRLINAYGPTETTVGVTAYELPPDFTGLDIPIGRPCPNTQLYILDTEQQPVPIGACGELYIAGAGVARGYLRRPGLTGEKFVANPFDAGTRMYRSGDLVRYLPDGNIVYLGRIDEQVKIRGFRIEPGEIEAGLMALEGVRQAVVVTREDSPGNRRLAAYVVAQDGAVVQAAKLRAGLQARLPEYMVPTHILLLGQLPLTPNGKMDRKALPQPDAA

SEQ ID NO: 189 - DNA, 2921 bp, Artificial Sequence
  Description of Artificial Sequence: Synthetic polynucleotide
tctagaacgacggatgcggtctcgacgataccgcttgccgatcggcagcaaccgttggcactgtccttcgctcaggagcgtcagtggttcctctggcaactggagccggaaagcgcggcctaccatattccgagtgccttgcgcctacgcgggcggctggacgtggatgccttgcaacgcagcttcgacagcctggtcgcgcggcatgaaaccttgcgtacccgcttccggctggagggagggcgttcgtaccagcaggtacaacctgcggttagcgtttccatcgagcgggaacagttcggtgaagaaggcctgatcgaacggatacaggccatcgttgtgcagccattcgacctggaacgggggccgctgctgcgggtgaacctgttgcaactggccgaggacgaccatgtactggtgctggtccagcaccacatcgtgtccgatggttggtcgatgcaggtgatggtcgaggaactggtccagctctatgccgcctatagccaagggctcgacgtggtgttgccagccctgccgatccagtacgcggactacgccctgtggcagcgcagctggatggaggcgggggaaaaggagcgccagttggcgtactggaccggcctgctgggcggcgagcagccggtgctggagttgccgttcgatcggccgcgtccggcccggcagagccatcgtggcgcgcagttgggtttcgagctatcgcgggaactggtcgaggccgtgagagccttggcccagcgtgaaggcgccagtagtttcatgctgttgctggcctcgttccaggcgctgttgtatcgctacagcgggcaggcggatatccgtgtcggtgtgccgatcgccaatcgcaaccgcgtggagaccgagcggctgatcggcttcttcgtcaacacccaggtgctcaaggccgacctggacggtcggatgggcttcgacgagctgctggcccaggcccgccaacgcgcgctggaggcccaggcgcaccaggacctgccgttcgagcaactggtggaagccttgcagccggagcgcaatgccagccacaacccactgttccaggtgctgttcaaccatcagagcgagatacgctcggtgacgcccgaggttcagttggaggacctgcgtctggaaggcctggcctgggacggccagactgcgcagttcgacctgacgctggatattcaggaagacgaaaacggcatctgggcctccttcgactatgccaccgatctgttcgacgcctccaccgtggaacgcctggccggccattggcgcaacctgttgcgcggcatcgtcgccaacccacgacagcggctcggcgagttgccgctgctggatgctgccgaacagcagcagattgttcgcgactggaacgccacggctgccgatttccctggtgagcactgcctgcacagcctgatcgaagcccaggtacaggctacgccggacgctccggcactgatttttgcggctgaacaactgagctatgcgcaacttaacgcccgcgctaatcagcttgcccatcgcttgcgtgaggcgggtgttggcccggatgtgctggtggggatttgtgtcgagcgcagcgtggatatggtcattggtctgctggcgatcatcaaggccggtggcgcttacgtgccgctggacccggattaccctgaagatcgtttggcctacatgatgcaggacagcggcattggcttgctgttgacccagagtgcgctgctacagggcctgccggttcaggtgcagagcctttgtctggatcaggagggcgattggcttgacggttacagcaccgccaacccgatcaacctcagtcacccgcagaacctggcatacgtaatttacacctccggttcgaccggcaagcccaagggcgccggcaacagccatcgcgccctggtcaaccgtttgcactggatgcagaaggcttacgcactggatggcagcgatacggtattgcagaaaaccccgttcagtttcgatgtctcggtgtgggaattcttctggccgctgctgaccggagcacgtttggccgtggcgttgccgggcgatcatcgcgatccggagcggctggtgcagaccatccgcgaacatcaggtcacgacgctgcactttgtcccgtcgatgctccaggcgtttctgactcatccgcaggtagaaggctgtaacagcctgcgtcgtgtggtgtgcagcggcgaagcactgccttccgaactggccggtcaggtgctcaagcgtctgccgcagacgggtttgttcaacctgtacggcccgaccgaagcggctatcgacgtgacgcattggacctgcaccaaagacgacgtgctcagcgtgccgattggcgggaccatcccggacctgtcctggtacatcctcgaccgtgacctgaacccggtgccgcgcggcgcggtgggcgagctgtacatcggtcgcgccggtctggcgcgcggctacctgaggcggcccgggttgagtgccacccgcttcgtgccgaacccgttccccggcggtgccggcgagcggctgtaccgtaccggcgacctggcacggttccaggcggatggcaatatcgagtacatcgggcgtatcgaccaccaggtgaaggttcgcggcttccgtatcgaactgggtgagatcgaagcggcgctcgccggtctggccggggtacgcgatgccgtggtgctggcccatgacggggtcggcggcacgcaactggtgggatacgtggtggcggactcggcggaggatgccgagcgtctgcgggagtcgctgcgggagtcgctgaagcggcacctgccggactacatggtgccggcgcacctgatgctgctggagcggatgccgctgacggtcaatggcaagctcgaccggcaggcgttgccgcaaccggatgcggccgc

SEQ ID NO: 190 - protein, 973 aa, Artificial Sequence
  Description of Artificial Sequence: Synthetic polypeptide
SRTTDAVSTIPLADRQQPLALSFAQERQWFLWQLEPESAAYHIPSALRLRGRLDVDALQRSFDSLVARHETLRTRFRLEGGRSYQQVQPAVSVSIEREQFGEEGLIERIQAIVVQPFDLERGPLLRVNLLQLAEDDHVLVLVQHHIVSDGWSMQVMVEELVQLYAAYSQGLDVVLPALPIQYADYALWQRSWMEAGEKERQLAYWTGLLGGEQPVLELPFDRPRPARQSHRGAQLGFELSRELVEAVRALAQREGASSFMLLLASFQALLYRYSGQADIRVGVPIANRNRVETERLIGFFVNTQVLKADLDGRMGFDELLAQARQRALEAQAHQDLPFEQLVEALQPERNASHNPLFQVLFNHQSEIRSVTPEVQLEDLRLEGLAWDGQTAQFDLTLDIQEDENGIWASFDYATDLFDASTVERLAGHWRNLLRGIVANPRQRLGELPLLDAAEQQQIVRDWNATAADFPGEHCLHSLIEAQVQATPDAPALIFAAEQLSYAQLNARANQLAHRLREAGVGPDVLVGICVERSVDMVIGLLAIIKAGGAYVPLDPDYPEDRLAYMMQDSGIGLLLTQSALLQGLPVQVQSLCLDQEGDWLDGYSTANPINLSHPQNLAYVIYTSGSTGKPKGAGNSHRALVNRLHWMQKAYALDGSDTVLQKTPFSFDVSVWEFFWPLLTGARLAVALPGDHRDPERLVQTIREHQVTTLHFVPSMLQAFLTHPQVEGCNSLRRVVCSGEALPSELAGQVLKRLPQTGLFNLYGPTEAAIDVTHWTCTKDDVLSVPIGGTIPDLSWYILDRDLNPVPRGAVGELYIGRAGLARGYLRRPGLSATRFVPNPFPGGAGERLYRTGDLARFQADGNIEYIGRIDHQVKVRGFRIELGEIEAALAGLAGVRDAVVLAHDGVGGTQLVGYVVADSAEDAERLRESLRESLKRHLPDYMVPAHLMLLERMPLTVNGKLDRQALPQPDAA

SEQ ID NO: 191 - DNA, 2921 bp, Artificial Sequence
  Description of Artificial Sequence: Synthetic polynucleotide
tctagaacgacggatgcggtctcgacgataccgcttgccgatcggcagcaaccgttggcactgtccttcgctcaggagcgtcagtggttcctctggcaactggagccggaaagcgcggcctaccatattccgagtgccttgcgcctacgcgggcggctggacgtggatgccttgcaacgcagcttcgacagcctggtcgcgcggcatgaaaccttgcgtacccgcttccggctggagggagggcgttcgtaccagcaggtacaacctgcggttagcgtttccatcgagcgggaacagttcggtgaagaaggcctgatcgaacggatacaggccatcgttgtgcagccattcgacctggaacgggggccgctgctgcgggtgaacctgttgcaactggccgaggacgaccatgtactggtgctggtccagcaccacatcgtgtccgatggttggtcgatgcaggtgatggtcgaggaactggtccagctctatgccgcctatagccaagggctcgacgtggtgttgccagccctgccgatccagtacgcggactacgccctgtggcagcgcagctggatggaggcgggggaaaaggagcgccagttggcgtactggaccggcctgctgggcggcgagcagccggtgctggagttgccgttcgatcggccgcgtccggcccggcagagccatcgtggcgcgcagttgggtttcgagctatcgcgggaactggtcgaggccgtgagagccttggcccagcgtgaaggcgccagtagtttcatgctgttgctggcctcgttccaggcgctgttgtatcgctacagcgggcaggcggatatccgtgtcggtgtgccgatcgccaatcgcaaccgcgtggagaccgagcggctgatcggcttcttcgtcaacacccaggtgctcaaggccgacctggacggtcggatgggcttcgacgagctgctggcccaggcccgccaacgcgcgctggaggcccaggcgcaccaggacctgccgttcgagcaactggtggaagccttgcagccggagcgcaatgccagccacaacccactgttccaggtgctgttcaaccatcagagcgagatacgctcggtgacgcccgaggttcagttggaggacctgcgtctggaaggcctggcctgggacggccagactgcgcagttcgacctgacgctggatattcaggaagacgaaaacggcatctgggcctccttcgactatgccaccgatctgttcgacgcctccaccgtggaacgcctggccggccattggcgcaacctgttgcgcggcatcgtcgccaacccacgacagcggctcggcgagttgccgctgctggatgctgccgaacagcagcagattgttcgcgactggaacgccacggctgccgatttccctggtgagcactgcctgcacagcctgatcgaagcccaggtacaggctacgccggacgctccggcactgatttttgcggctgaacaactgagctatgcgcaacttaacgcccgcgctaatcagcttgcccatcgcttgcgtgaggcgggtgttggcccggatgtgctggtggggatttgtgtcgagcgcagcgtggatatggtcattggtctgctggcgatcatcaaggccggtggcgcttacgtgccgctggacccggattaccctgaagatcgtttggcctacatgatgcaggacagcggcattggcttgctgttgacccagagtgcgctgctacagggcctgccggttcaggtgcagagcctttgtctggatcaggagggcgattggcttgacggttacagcaccgccaacccgatcaacctcagtcacccgcagaacctggcatacgtaatttacacctccggttcgaccggcaagcccaagggcgccggcaacagccatcgcgccctggtcaaccgtttgcactggatgcagaaggcttacgcactggatggcagcgatacggtattgcagaaaaccccgttcagtttcgatgtctcggtgtgggaattcttctggccgctgctgaccggagcacgtttggccgtggcgttgccgggcgatcatcgcgatccggagcggctggtgcagaccatccgcgaacatcaggtcacgacgctgcactttgtcccgtcgatgctccaggcgtttctgactcatccgcaggtagaaggctgtaacagcctgcgtcgtgtggtgtgcagcggcgaagcactgccttccgaactggccggtcaggtgctcaagcgtctgccgcagacgggtttgttcaacctgtacggcccgaccgaagcggctatcgacgtgacgcattggacctgcaccaaagacgacgtgctcagcgtgccgattggtcgacctatcgataacctgaaaacccatatcctcgaccgtgacctgaacccggtgccgcgcggcgcggtgggcgagctgtacatcggtcgcgccggtctggcgcgcggctacctgaggcggcccgggttgagtgccacccgcttcgtgccgaacccgttccccggcggtgccggcgagcggctgtaccgtaccggcgacctggcacggttccaggcggatggcaatatcgagtacatcgggcgtatcgaccaccaggtgaaggttcgcggcttccgtatcgaactgggtgagatcgaagcggcgctcgccggtctggccggggtacgcgatgccgtggtgctggcccatgacggggtcggcggcacgcaactggtgggatacgtggtggcggactcggcggaggatgccgagcgtctgcgggagtcgctgcgggagtcgctgaagcggcacctgccggactacatggtgccggcgcacctgatgctgctggagcggatgccgctgacggtcaatggcaagctcgaccggcaggcgttgccgcaaccggatgcggccgc

SEQ ID NO: 192 - protein, 973 aa, Artificial Sequence
  Description of Artificial Sequence: Synthetic polypeptide
SRTTDAVSTIPLADRQQPLALSFAQERQWFLWQLEPESAAYHIPSALRLRGRLDVDALQRSFDSLVARHETLRTRFRLEGGRSYQQVQPAVSVSIEREQFGEEGLIERIQAIVVQPFDLERGPLLRVNLLQLAEDDHVLVLVQHHIVSDGWSMQVMVEELVQLYAAYSQGLDVVLPALPIQYADYALWQRSWMEAGEKERQLAYWTGLLGGEQPVLELPFDRPRPARQSHRGAQLGFELSRELVEAVRALAQREGASSFMLLLASFQALLYRYSGQADIRVGVPIANRNRVETERLIGFFVNTQVLKADLDGRMGFDELLAQARQRALEAQAHQDLPFEQLVEALQPERNASHNPLFQVLFNHQSEIRSVTPEVQLEDLRLEGLAWDGQTAQFDLTLDIQEDENGIWASFDYATDLFDASTVERLAGHWRNLLRGIVANPRQRLGELPLLDAAEQQQIVRDWNATAADFPGEHCLHSLIEAQVQATPDAPALIFAAEQLSYAQLNARANQLAHRLREAGVGPDVLVGICVERSVDMVIGLLAIIKAGGAYVPLDPDYPEDRLAYMMQDSGIGLLLTQSALLQGLPVQVQSLCLDQEGDWLDGYSTANPINLSHPQNLAYVIYTSGSTGKPKGAGNSHRALVNRLHWMQKAYALDGSDTVLQKTPFSFDVSVWEFFWPLLTGARLAVALPGDHRDPERLVQTIREHQVTTLHFVPSMLQAFLTHPQVEGCNSLRRVVCSGEALPSELAGQVLKRLPQTGLFNLYGPTEAAIDVTHWTCTKDDVLSVPIGRPIDNLKTHILDRDLNPVPRGAVGELYIGRAGLARGYLRRPGLSATRFVPNPFPGGAGERLYRTGDLARFQADGNIEYIGRIDHQVKVRGFRIELGEIEAALAGLAGVRDAVVLAHDGVGGTQLVGYVVADSAEDAERLRESLRESLKRHLPDYMVPAHLMLLERMPLTVNGKLDRQALPQPDAA

SEQ ID NO: 193 - DNA, 2921 bp, Artificial Sequence
  Description of Artificial Sequence: Synthetic polynucleotide
tctagaacgacggatgcggtctcgacgataccgcttgccgatcggcagcaaccgttggcactgtccttcgctcaggagcgtcagtggttcctctggcaactggagccggaaagcgcggcctaccatattccgagtgccttgcgcctacgcgggcggctggacgtggatgccttgcaacgcagcttcgacagcctggtcgcgcggcatgaaaccttgcgtacccgcttccggctggagggagggcgttcgtaccagcaggtacaacctgcggttagcgtttccatcgagcgggaacagttcggtgaagaaggcctgatcgaacggatacaggccatcgttgtgcagccattcgacctggaacgggggccgctgctgcgggtgaacctgttgcaactggccgaggacgaccatgtactggtgctggtccagcaccacatcgtgtccgatggttggtcgatgcaggtgatggtcgaggaactggtccagctctatgccgcctatagccaagggctcgacgtggtgttgccagccctgccgatccagtacgcggactacgccctgtggcagcgcagctggatggaggcgggggaaaaggagcgccagttggcgtactggaccggcctgctgggcggcgagcagccggtgctggagttgccgttcgatcggccgcgtccggcccggcagagccatcgtggcgcgcagttgggtttcgagctatcgcgggaactggtcgaggccgtgagagccttggcccagcgtgaaggcgccagtagtttcatgctgttgctggcctcgttccaggcgctgttgtatcgctacagcgggcaggcggatatccgtgtcggtgtgccgatcgccaatcgcaaccgcgtggagaccgagcggctgatcggcttcttcgtcaacacccaggtgctcaaggccgacctggacggtcggatgggcttcgacgagctgctggcccaggcccgccaacgcgcgctggaggcccaggcgcaccaggacctgccgttcgagcaactggtggaagccttgcagccggagcgcaatgccagccacaacccactgttccaggtgctgttcaaccatcagagcgagatacgctcggtgacgcccgaggttcagttggaggacctgcgtctggaaggcctggcctgggacggccagactgcgcagttcgacctgacgctggatattcaggaagacgaaaacggcatctgggcctccttcgactatgccaccgatctgttcgacgcctccaccgtggaacgcctggccggccattggcgcaacctgttgcgcggcatcgtcgccaacccacgacagcggctcggcgagttgccgctgctggatgctgccgaacagcagcagattgttcgcgactggaacgccacggctgccgatttccctggtgagcactgcctgcacagcctgatcgaagcccaggtacaggctacgccggacgctccggcactgatttttgcggctgaacaactgagctatgcgcaacttaacgcccgcgctaatcagcttgcccatcgcttgcgtgaggcgggtgttggcccggatgtgctggtggggatttgtgtcgagcgcagcgtggatatggtcattggtctgctggcgatcatcaaggccggtggcgcttacgtgccgctggacccggattaccctgaagatcgtttggcctacatgatgcaggacagcggcattggcttgctgttgacccagagtgcgctgctacagggcctgccggttcaggtgcagagcctttgtctggatcaggagggcgattggcttgacggttacagcaccgccaacccgatcaacctcagtcacccgcagaacctggcatacgtaatttacacctccggttcgaccggcaagcccaagggcgccggcaacagccatcgcgccctggtcaaccgtttgcactggatgcagaaggcttacgcactggatggcagcgatacggtattgcagaaaaccccgttcagtttcgatgtctcggtgtgggaattcttctggccgctgctgaccggagcacgtttggccgtggcgttgccgggcgatcatcgcgatccggagcggctggtgcagaccatccgcgaacatcaggtcacgacgctgcactttgtcccgtcgatgctccaggcgtttctgactcatccgcaggtagaaggctgtaacagcctgcgtcgtgtggtgtgcagcggcgaagcactgccttccgaactggccggtcaggtgctcaagcgtctgccgcagacgggtttgttcaacctgtacggcccgaccgaagcggctatcgacgtgacgcattggacctgcaccaaagacgacgtgctcagcgtgccgattggtcgacctatcgataacctgaaaacccatatcctcgacgacggattgctgcctgccgcgcagggcgtctcggcagagctgtacctgggcggtatcggtctggcgcggggttatcacaggcggcccgggttgagtgccacccgcttcgtgccgaacccgttccccggcggtgccggcgagcggctgtaccgtaccggcgacctggcacggttccaggcggatggcaatatcgagtacatcgggcgtatcgaccaccaggtgaaggttcgcggcttccgtatcgaactgggtgagatcgaagcggcgctcgccggtctggccggggtacgcgatgccgtggtgctggcccatgacggggtcggcggcacgcaactggtgggatacgtggtggcggactcggcggaggatgccgagcgtctgcgggagtcgctgcgggagtcgctgaagcggcacctgccggactacatggtgccggcgcacctgatgctgctggagcggatgccgctgacggtcaatggcaagctcgaccggcaggcgttgccgcaaccggatgcggccgc

SEQ ID NO: 194 - protein, 973 aa, Artificial Sequence
  Description of Artificial Sequence: Synthetic polypeptide
SRTTDAVSTIPLADRQQPLALSFAQERQWFLWQLEPESAAYHIPSALRLRGRLDVDALQRSFDSLVARHETLRTRFRLEGGRSYQQVQPAVSVSIEREQFGEEGLIERIQAIVVQPFDLERGPLLRVNLLQLAEDDHVLVLVQHHIVSDGWSMQVMVEELVQLYAAYSQGLDVVLPALPIQYADYALWQRSWMEAGEKERQLAYWTGLLGGEQPVLELPFDRPRPARQSHRGAQLGFELSRELVEAVRALAQREGASSFMLLLASFQALLYRYSGQADIRVGVPIANRNRVETERLIGFFVNTQVLKADLDGRMGFDELLAQARQRALEAQAHQDLPFEQLVEALQPERNASHNPLFQVLFNHQSEIRSVTPEVQLEDLRLEGLAWDGQTAQFDLTLDIQEDENGIWASFDYATDLFDASTVERLAGHWRNLLRGIVANPRQRLGELPLLDAAEQQQIVRDWNATAADFPGEHCLHSLIEAQVQATPDAPALIFAAEQLSYAQLNARANQLAHRLREAGVGPDVLVGICVERSVDMVIGLLAIIKAGGAYVPLDPDYPEDRLAYMMQDSGIGLLLTQSALLQGLPVQVQSLCLDQEGDWLDGYSTANPINLSHPQNLAYVIYTSGSTGKPKGAGNSHRALVNRLHWMQKAYALDGSDTVLQKTPFSFDVSVWEFFWPLLTGARLAVALPGDHRDPERLVQTIREHQVTTLHFVPSMLQAFLTHPQVEGCNSLRRVVCSGEALPSELAGQVLKRLPQTGLFNLYGPTEAAIDVTHWTCTKDDVLSVPIGRPIDNLKTHILDDGLLPAAQGVSAELYLGGIGLARGYHRRPGLSATRFVPNPFPGGAGERLYRTGDLARFQADGNIEYIGRIDHQVKVRGFRIELGEIEAALAGLAGVRDAVVLAHDGVGGTQLVGYVVADSAEDAERLRESLRESLKRHLPDYMVPAHLMLLERMPLTVNGKLDRQALPQPDAA

SEQ ID NO: 195 - DNA, 2918 bp, Artificial Sequence
  Description of Artificial Sequence: Synthetic polynucleotide
tctagaacgacggatgcggtctcgacgataccgcttgccgatcggcagcaaccgttggcactgtccttcgctcaggagcgtcagtggttcctctggcaactggagccggaaagcgcggcctaccatattccgagtgccttgcgcctacgcgggcggctggacgtggatgccttgcaacgcagcttcgacagcctggtcgcgcggcatgaaaccttgcgtacccgcttccggctggagggagggcgttcgtaccagcaggtacaacctgcggttagcgtttccatcgagcgggaacagttcggtgaagaaggcctgatcgaacggatacaggccatcgttgtgcagccattcgacctggaacgggggccgctgctgcgggtgaacctgttgcaactggccgaggacgaccatgtactggtgctggtccagcaccacatcgtgtccgatggttggtcgatgcaggtgatggtcgaggaactggtccagctctatgccgcctatagccaagggctcgacgtggtgttgccagccctgccgatccagtacgcggactacgccctgtggcagcgcagctggatggaggcgggggaaaaggagcgccagttggcgtactggaccggcctgctgggcggcgagcagccggtgctggagttgccgttcgatcggccgcgtccggcccggcagagccatcgtggcgcgcagttgggtttcgagctatcgcgggaactggtcgaggccgtgagagccttggcccagcgtgaaggcgccagtagtttcatgctgttgctggcctcgttccaggcgctgttgtatcgctacagcgggcaggcggatatccgtgtcggtgtgccgatcgccaatcgcaaccgcgtggagaccgagcggctgatcggcttcttcgtcaacacccaggtgctcaaggccgacctggacggtcggatgggcttcgacgagctgctggcccaggcccgccaacgcgcgctggaggcccaggcgcaccaggacctgccgttcgagcaactggtggaagccttgcagccggagcgcaatgccagccacaacccactgttccaggtgctgttcaaccatcagagcgagatacgctcggtgacgcccgaggttcagttggaggacctgcgtctggaaggcctggcctgggacggccagactgcgcagttcgacctgacgctggatattcaggaagacgaaaacggcatctgggcctccttcgactatgccaccgatctgttcgacgcctccaccgtggaacgcctggccggccattggcgcaacctgttgcgcggcatcgtcgccaacccacgacagcggctcggcgagttgccgctgctggatgctgccgaacagcagcagattgttcgcgactggaacgccacggctgccgatttccctggtgagcactgcctgcacagcctgatcgaagcccaggtacaggctacgccggacgctccggcactgatttttgcggctgaacaactgagctatgcgcaacttaacgcccgcgctaatcagcttgcccatcgcttgcgtgaggcgggtgttggcccggatgtgctggtggggatttgtgtcgagcgcagcgtggatatggtcattggtctgctggcgatcatcaaggccggtggcgcttacgtgccgctggacccggattaccctgaagatcgtttggcctacatgatgcaggacagcggcattggcttgctgttgacccagagtgcgctgctacagggcctgccggttcaggtgcagagcctttgtctggatcaggagggcgattggcttgacggttacagcaccgccaacccgatcaacctcagtcacccgcagaacctggcatacgtaatttacacctccggttcgaccggcaagcccaagggcgccggcaacagccatcgcgccctggtcaaccgtttgcactggatgcagaaggcttacgcactggatggcagcgatacggtattgcagaaaaccccgttcagtttcgatgtctcggtgtgggaattcttctggccgctgctgaccggagcacgtttggccgtggcgttgccgggcgatcatcgcgatccggagcggctggtgcagaccatccgcgaacatcaggtcacgacgctgcactttgtcccgtcgatgctccaggcgtttctgactcatccgcaggtagaaggctgtaacagcctgcgtcgtgtggtgtgcagcggcgaagcactgccttccgaactggccggtcaggtgctcaagcgtctgccgcagacgggtttgttcaacctgtacggcccgaccgaagcggctatcgacgtgacgcattggacctgcaccaaagacgacgtgctcagcgtgccgattggtcgacctatcgataacctgaaaacccatatcctcgacgacggattgctgcctgccgcgcagggcgtctcggcagagctgtacctgggcggtatcggtctggcgcggggttatcacaatcgcgcggcgctgacggctgaacgctttgtgccggatcctttcgacgagcagggcgggcgtctttaccggaccggggatctggcgcgttatcaggcggatggcaatatcgagtacatcgggcgtatcgaccaccaggtgaaggttcgcggcttccgtatcgaactgggtgagatcgaagcggcgctcgccggtctggccggggtacgcgatgccgtggtgctggcccatgacggggtcggcggcacgcaactggtgggatacgtggtggcggactcggcggaggatgccgagcgtctgcgggagtcgctgcgggagtcgctgaagcggcacctgccggactacatggtgccggcgcacctgatgctgctggagcggatgccgctgacggtcaatggcaagctcgaccggcaggcgttgccgcaaccggatgcggccgc

SEQ ID NO: 196 - protein, 972 aa, Artificial Sequence
  Description of Artificial Sequence: Synthetic polypeptide
SRTTDAVSTIPLADRQQPLALSFAQERQWFLWQLEPESAAYHIPSALRLRGRLDVDALQRSFDSLVARHETLRTRFRLEGGRSYQQVQPAVSVSIEREQFGEEGLIERIQAIVVQPFDLERGPLLRVNLLQLAEDDHVLVLVQHHIVSDGWSMQVMVEELVQLYAAYSQGLDVVLPALPIQYADYALWQRSWMEAGEKERQLAYWTGLLGGEQPVLELPFDRPRPARQSHRGAQLGFELSRELVEAVRALAQREGASSFMLLLASFQALLYRYSGQADIRVGVPIANRNRVETERLIGFFVNTQVLKADLDGRMGFDELLAQARQRALEAQAHQDLPFEQLVEALQPERNASHNPLFQVLFNHQSEIRSVTPEVQLEDLRLEGLAWDGQTAQFDLTLDIQEDENGIWASFDYATDLFDASTVERLAGHWRNLLRGIVANPRQRLGELPLLDAAEQQQIVRDWNATAADFPGEHCLHSLIEAQVQATPDAPALIFAAEQLSYAQLNARANQLAHRLREAGVGPDVLVGICVERSVDMVIGLLAIIKAGGAYVPLDPDYPEDRLAYMMQDSGIGLLLTQSALLQGLPVQVQSLCLDQEGDWLDGYSTANPINLSHPQNLAYVIYTSGSTGKPKGAGNSHRALVNRLHWMQKAYALDGSDTVLQKTPFSFDVSVWEFFWPLLTGARLAVALPGDHRDPERLVQTIREHQVTTLHFVPSMLQAFLTHPQVEGCNSLRRVVCSGEALPSELAGQVLKRLPQTGLFNLYGPTEAAIDVTHWTCTKDDVLSVPIGRPIDNLKTHILDDGLLPAAQGVSAELYLGGIGLARGYHNRAALTAERFVPDPFDEQGGRLYRTGDLARYQADGNIEYIGRIDHQVKVRGFRIELGEIEAALAGLAGVRDAVVLAHDGVGGTQLVGYVVADSAEDAERLRESLRESLKRHLPDYMVPAHLMLLERMPLTVNGKLDRQALPQPDAA

SEQ ID NO: 197 - DNA, 2918 bp, Artificial Sequence
  Description of Artificial Sequence: Synthetic polynucleotide
tctagaacgacggatgcggtctcgacgataccgcttgccgatcggcagcaaccgttggcactgtccttcgctcaggagcgtcagtggttcctctggcaactggagccggaaagcgcggcctaccatattccgagtgccttgcgcctacgcgggcggctggacgtggatgccttgcaacgcagcttcgacagcctggtcgcgcggcatgaaaccttgcgtacccgcttccggctggagggagggcgttcgtaccagcaggtacaacctgcggttagcgtttccatcgagcgggaacagttcggtgaagaaggcctgatcgaacggatacaggccatcgttgtgcagccattcgacctggaacgggggccgctgctgcgggtgaacctgttgcaactggccgaggacgaccatgtactggtgctggtccagcaccacatcgtgtccgatggttggtcgatgcaggtgatggtcgaggaactggtccagctctatgccgcctatagccaagggctcgacgtggtgttgccagccctgccgatccagtacgcggactacgccctgtggcagcgcagctggatggaggcgggggaaaaggagcgccagttggcgtactggaccggcctgctgggcggcgagcagccggtgctggagttgccgttcgatcggccgcgtccggcccggcagagccatcgtggcgcgcagttgggtttcgagctatcgcgggaactggtcgaggccgtgagagccttggcccagcgtgaaggcgccagtagtttcatgctgttgctggcctcgttccaggcgctgttgtatcgctacagcgggcaggcggatatccgtgtcggtgtgccgatcgccaatcgcaaccgcgtggagaccgagcggctgatcggcttcttcgtcaacacccaggtgctcaaggccgacctggacggtcggatgggcttcgacgagctgctggcccaggcccgccaacgcgcgctggaggcccaggcgcaccaggacctgccgttcgagcaactggtggaagccttgcagccggagcgcaatgccagccacaacccactgttccaggtgctgttcaaccatcagagcgagatacgctcggtgacgcccgaggttcagttggaggacctgcgtctggaaggcctggcctgggacggccagactgcgcagttcgacctgacgctggatattcaggaagacgaaaacggcatctgggcctccttcgactatgccaccgatctgttcgacgcctccaccgtggaacgcctggccggccattggcgcaacctgttgcgcggcatcgtcgccaacccacgacagcggctcggcgagttgccgctgctggatgctgccgaacagcagcagattgttcgcgactggaacgccacggctgccgatttccctggtgagcactgcctgcacagcctgatcgaagcccaggtacaggctacgccggacgctccggcactgatttttgcggctgaacaactgagctatgcgcaacttaacgcccgcgctaatcagcttgcccatcgcttgcgtgaggcgggtgttggcccggatgtgctggtggggatttgtgtcgagcgcagcgtggatatggtcattggtctgctggcgatcatcaaggccggtggcgcttacgtgccgctggacccggattaccctgaagatcgtttggcctacatgatgcaggacagcggcattggcttgctgttgacccagagtgcgctgctacagggcctgccggttcaggtgcagagcctttgtctggatcaggagggcgattggcttgacggttacagcaccgccaacccgatcaacctcagtcacccgcagaacctggcatacgtaatttacacctccggttcgaccggcaagcccaagggcgccggcaacagccatcgcgccctggtcaaccgtttgcactggatgcagaaggcttacgcactggatggcagcgatacggtattgcagaaaaccccgttcagtttcgatgtctcggtgtgggaattcttctggccgctgctgaccggagcacgtttggccgtggcgttgccgggcgatcatcgcgatccggagcggctggtgcagaccatccgcgaacatcaggtcacgacgctgcactttgtcccgtcgatgctccaggcgtttctgactcatccgcaggtagaaggctgtaacagcctgcgtcgtgtggtgtgcagcggcgaagcactgccttccgaactggccggtcaggtgctcaagcgtctgccgcagacgggtttgttcaacctgtacggcccgaccgaagcggctatcgacgtgacgcattggacctgcaccaaagacgacgtgctcagcgtgccgattggtcgacctatcgataacctgaaaacccatatcctcgacgacggattgctgcctgccgcgcagggcgtctcggcagagctgtacctgggcggtatcggtctggcgcggggttatcacaatcgcgcggcgctgacggctgaacgctttgtgccggatcctttcgacgagcagggcgggcgtctttaccggaccggggatctggcgcgttatcgcgatgaaggcgttatcgaatacgccgggcgtatcgaccaccaggtgaaggttcgcggcttccgtatcgaactgggtgagatcgaagcggcgctcgccggtctggccggggtacgcgatgccgtggtgctggcccatgacggggtcggcggcacgcaactggtgggatacgtggtggcggactcggcggaggatgccgagcgtctgcgggagtcgctgcgggagtcgctgaagcggcacctgccggactacatggtgccggcgcacctgatgctgctggagcggatgccgctgacggtcaatggcaagctcgaccggcaggcgttgccgcaaccggatgcggccgc

SEQ ID NO: 198 - protein, 972 aa, Artificial Sequence
  Description of Artificial Sequence: Synthetic polypeptide
SRTTDAVSTIPLADRQQPLALSFAQERQWFLWQLEPESAAYHIPSALRLRGRLDVDALQRSFDSLVARHETLRTRFRLEGGRSYQQVQPAVSVSIEREQFGEEGLIERIQAIVVQPFDLERGPLLRVNLLQLAEDDHVLVLVQHHIVSDGWSMQVMVEELVQLYAAYSQGLDVVLPALPIQYADYALWQRSWMEAGEKERQLAYWTGLLGGEQPVLELPFDRPRPARQSHRGAQLGFELSRELVEAVRALAQREGASSFMLLLASFQALLYRYSGQADIRVGVPIANRNRVETERLIGFFVNTQVLKADLDGRMGFDELLAQARQRALEAQAHQDLPFEQLVEALQPERNASHNPLFQVLFNHQSEIRSVTPEVQLEDLRLEGLAWDGQTAQFDLTLDIQEDENGIWASFDYATDLFDASTVERLAGHWRNLLRGIVANPRQRLGELPLLDAAEQQQIVRDWNATAADFPGEHCLHSLIEAQVQATPDAPALIFAAEQLSYAQLNARANQLAHRLREAGVGPDVLVGICVERSVDMVIGLLAIIKAGGAYVPLDPDYPEDRLAYMMQDSGIGLLLTQSALLQGLPVQVQSLCLDQEGDWLDGYSTANPINLSHPQNLAYVIYTSGSTGKPKGAGNSHRALVNRLHWMQKAYALDGSDTVLQKTPFSFDVSVWEFFWPLLTGARLAVALPGDHRDPERLVQTIREHQVTTLHFVPSMLQAFLTHPQVEGCNSLRRVVCSGEALPSELAGQVLKRLPQTGLFNLYGPTEAAIDVTHWTCTKDDVLSVPIGRPIDNLKTHILDDGLLPAAQGVSAELYLGGIGLARGYHNRAALTAERFVPDPFDEQGGRLYRTGDLARYRDEGVIEYAGRIDHQVKVRGFRIELGEIEAALAGLAGVRDAVVLAHDGVGGTQLVGYVVADSAEDAERLRESLRESLKRHLPDYMVPAHLMLLERMPLTVNGKLDRQALPQPDAA

SEQ ID NO: 199 - DNA, 2918 bp, Artificial Sequence
  Description of Artificial Sequence: Synthetic polynucleotide
tctagaacgacggatgcggtctcgacgataccgcttgccgatcggcagcaaccgttggcactgtccttcgctcaggagcgtcagtggttcctctggcaactggagccggaaagcgcggcctaccatattccgagtgccttgcgcctacgcgggcggctggacgtggatgccttgcaacgcagcttcgacagcctggtcgcgcggcatgaaaccttgcgtacccgcttccggctggagggagggcgttcgtaccagcaggtacaacctgcggttagcgtttccatcgagcgggaacagttcggtgaagaaggcctgatcgaacggatacaggccatcgttgtgcagccattcgacctggaacgggggccgctgctgcgggtgaacctgttgcaactggccgaggacgaccatgtactggtgctggtccagcaccacatcgtgtccgatggttggtcgatgcaggtgatggtcgaggaactggtccagctctatgccgcctatagccaagggctcgacgtggtgttgccagccctgccgatccagtacgcggactacgccctgtggcagcgcagctggatggaggcgggggaaaaggagcgccagttggcgtactggaccggcctgctgggcggcgagcagccggtgctggagttgccgttcgatcggccgcgtccggcccggcagagccatcgtggcgcgcagttgggtttcgagctatcgcgggaactggtcgaggccgtgagagccttggcccagcgtgaaggcgccagtagtttcatgctgttgctggcctcgttccaggcgctgttgtatcgctacagcgggcaggcggatatccgtgtcggtgtgccgatcgccaatcgcaaccgcgtggagaccgagcggctgatcggcttcttcgtcaacacccaggtgctcaaggccgacctggacggtcggatgggcttcgacgagctgctggcccaggcccgccaacgcgcgctggaggcccaggcgcaccaggacctgccgttcgagcaactggtggaagccttgcagccggagcgcaatgccagccacaacccactgttccaggtgctgttcaaccatcagagcgagatacgctcggtgacgcccgaggttcagttggaggacctgcgtctggaaggcctggcctgggacggccagactgcgcagttcgacctgacgctggatattcaggaagacgaaaacggcatctgggcctccttcgactatgccaccgatctgttcgacgcctccaccgtggaacgcctggccggccattggcgcaacctgttgcgcggcatcgtcgccaacccacgacagcggctcggcgagttgccgctgctggatgctgccgaacagcagcagattgttcgcgactggaacgccacggctgccgatttccctggtgagcactgcctgcacagcctgatcgaagcccaggtacaggctacgccggacgctccggcactgatttttgcggctgaacaactgagctatgcgcaacttaacgcccgcgctaatcagcttgcccatcgcttgcgtgaggcgggtgttggcccggatgtgctggtggggatttgtgtcgagcgcagcgtggatatggtcattggtctgctggcgatcatcaaggccggtggcgcttacgtgccgctggacccggattaccctgaagatcgtttggcctacatgatgcaggacagcggcattggcttgctgttgacccagagtgcgctgctacagggcctgccggttcaggtgcagagcctttgtctggatcaggagggcgattggcttgacggttacagcaccgccaacccgatcaacctcagtcacccgcagaacctggcatacgtaatttacacctccggttcgaccggcaagcccaagggcgccggcaacagccatcgcgccctggtcaaccgtttgcactggatgcagaaggcttacgcactggatggcagcgatacggtattgcagaaaaccccgttcagtttcgatgtctcggtgtgggaattcttctggccgctgctgaccggagcacgtttggccgtggcgttgccgggcgatcatcgcgatccggagcggctggtgcagaccatccgcgaacatcaggtcacgacgctgcactttgtcccgtcgatgctccaggcgtttctgactcatccgcaggtagaaggctgtaacagcctgcgtcgtgtggtgtgcagcggcgaagcactgccttccgaactggccggtcaggtgctcaagcgtctgccgcagacgggtttgttcaacctgtacggcccgaccgaagcggctatcgacgtgacgcattggacctgcaccaaagacgacgtgctcagcgtgccgattggtcgacctatcgataacctgaaaacccatatcctcgacgacggattgctgcctgccgcgcagggcgtctcggcagagctgtacctgggcggtatcggtctggcgcggggttatcacaatcgcgcggcgctgacggctgaacgctttgtgccggatcctttcgacgagcagggcgggcgtctttaccggaccggggatctggcgcgttatcgcgatgaaggcgttatcgaatacgccgggcgtatcgaccatcaggtgaaggttcgcggcttccgtatcgaactgggtgagatcgaagcggcgctcgccggtctggccggggtacgcgatgccgtggtgctggcccatgacggggtcggcggcacgcaactggtgggatacgtggtggcggactcggcggaggatgccgagcgtctgcgggagtcgctgcgggagtcgctgaagcggcacctgccggactacatggtgccggcgcacctgatgctgctggagcggatgccgctgacggtcaatggcaagctcgaccggcaggcgttgccgcaaccggatgcggccgc

SEQ ID NO: 200 - protein, 972 aa, Artificial Sequence; identical to SEQ ID NO: 198
  Description of Artificial Sequence: Synthetic polypeptide

SEQ ID NO: 201 - DNA, 2918 bp, Artificial Sequence
  Description of Artificial Sequence: Synthetic polynucleotide
tctagaacgacggatgcggtctcgacgataccgcttgccgatcggcagcaaccgttggcactgtccttcgctcaggagcgtcagtggttcctctggcaactggagccggaaagcgcggcctaccatattccgagtgccttgcgcctacgcgggcggctggacgtggatgccttgcaacgcagcttcgacagcctggtcgcgcggcatgaaaccttgcgtacccgcttccggctggagggagggcgttcgtaccagcaggtacaacctgcggttagcgtttccatcgagcgggaacagttcggtgaagaaggcctgatcgaacggatacaggccatcgttgtgcagccattcgacctggaacgggggccgctgctgcgggtgaacctgttgcaactggccgaggacgaccatgtactggtgctggtccagcaccacatcgtgtccgatggttggtcgatgcaggtgatggtcgaggaactggtccagctctatgccgcctatagccaagggctcgacgtggtgttgccagccctgccgatccagtacgcggactacgccctgtggcagcgcagctggatggaggcgggggaaaaggagcgccagttggcgtactggaccggcctgctgggcggcgagcagccggtgctggagttgccgttcgatcggccgcgtccggcccggcagagccatcgtggcgcgcagttgggtttcgagctatcgcgggaactggtcgaggccgtgagagccttggcccagcgtgaaggcgccagtagtttcatgctgttgctggcctcgttccaggcgctgttgtatcgctacagcgggcaggcggatatccgtgtcggtgtgccgatcgccaatcgcaaccgcgtggagaccgagcggctgatcggcttcttcgtcaacacccaggtgctcaaggccgacctggacggtcggatgggcttcgacgagctgctggcccaggcccgccaacgcgcgctggaggcccaggcgcaccaggacctgccgttcgagcaactggtggaagccttgcagccggagcgcaatgccagccacaacccactgttccaggtgctgttcaaccatcagagcgagatacgctcggtgacgcccgaggttcagttggaggacctgcgtctggaaggcctggcctgggacggccagactgcgcagttcgacctgacgctggatattcaggaagacgaaaacggcatctgggcctccttcgactatgccaccgatctgttcgacgcctccaccgtggaacgcctggccggccattggcgcaacctgttgcgcggcatcgtcgccaacccacgacagcggctcggcgagttgccgctgctggatgctgccgaacagcagcagattgttcgcgactggaacgccacggctgccgatttccctggtgagcactgcctgcacagcctgatcgaagcccaggtacaggctacgccggacgctccggcactgatttttgcggctgaacaactgagctatgcgcaacttaacgcccgcgctaatcagcttgcccatcgcttgcgtgaggcgggtgttggcccggatgtgctggtggggatttgtgtcgagcgcagcgtggatatggtcattggtctgctggcgatcatcaaggccggtggcgcttacgtgccgctggacccggattaccctgaagatcgtttggcctacatgatgcaggacagcggcattggcttgctgttgacccagagtgcgctgctacagggcctgccggttcaggtgcagagcctttgtctggatcaggagggcgattggcttgacggttacagcaccgccaacccgatcaacctcagtcacccgcagaacctggcatacgtaatttacacctccggttcgaccggcaagcccaagggcgccggcaacagccatcgcgccctggtcaaccgtttgcactggatgcagaaggcttacgcactggatggcagcgatacggtattgcagaaaaccccgttcagtttcgatgtctcggtgtgggaattcttctggccgctgctgaccggagcacgtttggccgtggcgttgccgggcgatcatcgcgatccggagcggctggtgcagaccatccgcgaacatcaggtcacgacgctgcactttgtcccgtcgatgctccaggcgtttctgactcatccgcaggtagaaggctgtaacagcctgcgtcgtgtggtgtgcagcggcgaagcactgccttccgaactggccggtcaggtgctcaagcgtctgccgcagacgggtttgttcaacctgtacggcccgaccgaagcggctatcgacgtgacgcattggacctgcaccaaagacgacgtgctcagcgtgccgattggtcgacctatcgataacctgaaaacccatatcctcgacgacggattgctgcctgccgcgcagggcgtctcggcagagctgtacctgggcggtatcggtctggcgcggggttatcacaatcgcgcggcgctgacggctgaacgctttgtgccggatcctttcgacgagcagggcgggcgtctttaccggaccggggatctggcgcgttatcgcgatgaaggcgttatcgaatacgccgggcgtatcgaccatcaggtgaaaattcgcggcctgcgtatcgagctgggcgagatcgaagcggcgctcgccggtctggccggggtacgcgatgccgtggtgctggcccatgacggggtcggcggcacgcaactggtgggatacgtggtggcggactcggcggaggatgccgagcgtctgcgggagtcgctgcgggagtcgctgaagcggcacctgccggactacatggtgccggcgcacctgatgctgctggagcggatgccgctgacggtcaatggcaagctcgaccggcaggcgttgccgcaaccggatgcggccgc

SEQ ID NO: 202 - protein, 972 aa, Artificial Sequence
  Description of Artificial Sequence: Synthetic polypeptide
SRTTDAVSTIPLADRQQPLALSFAQERQWFLWQLEPESAAYHIPSALRLRGRLDVDALQRSFDSLVARHETLRTRFRLEGGRSYQQVQPAVSVSIEREQFGEEGLIERIQAIVVQPFDLERGPLLRVNLLQLAEDDHVLVLVQHHIVSDGWSMQVMVEELVQLYAAYSQGLDVVLPALPIQYADYALWQRSWMEAGEKERQLAYWTGLLGGEQPVLELPFDRPRPARQSHRGAQLGFELSRELVEAVRALAQREGASSFMLLLASFQALLYRYSGQADIRVGVPIANRNRVETERLIGFFVNTQVLKADLDGRMGFDELLAQARQRALEAQAHQDLPFEQLVEALQPERNASHNPLFQVLFNHQSEIRSVTPEVQLEDLRLEGLAWDGQTAQFDLTLDIQEDENGIWASFDYATDLFDASTVERLAGHWRNLLRGIVANPRQRLGELPLLDAAEQQQIVRDWNATAADFPGEHCLHSLIEAQVQATPDAPALIFAAEQLSYAQLNARANQLAHRLREAGVGPDVLVGICVERSVDMVIGLLAIIKAGGAYVPLDPDYPEDRLAYMMQDSGIGLLLTQSALLQGLPVQVQSLCLDQEGDWLDGYSTANPINLSHPQNLAYVIYTSGSTGKPKGAGNSHRALVNRLHWMQKAYALDGSDTVLQKTPFSFDVSVWEFFWPLLTGARLAVALPGDHRDPERLVQTIREHQVTTLHFVPSMLQAFLTHPQVEGCNSLRRVVCSGEALPSELAGQVLKRLPQTGLFNLYGPTEAAIDVTHWTCTKDDVLSVPIGRPIDNLKTHILDDGLLPAAQGVSAELYLGGIGLARGYHNRAALTAERFVPDPFDEQGGRLYRTGDLARYRDEGVIEYAGRIDHQVKIRGLRIELGEIEAALAGLAGVRDAVVLAHDGVGGTQLVGYVVADSAEDAERLRESLRESLKRHLPDYMVPAHLMLLERMPLTVNGKLDRQALPQPDAA

SEQ ID NO: 203 - DNA, 2933 bp, Artificial Sequence
  Description of Artificial Sequence: Synthetic polynucleotide
tctagaacgacggatgcggtctcgacgataccgcttgccgatcggcagcaaccgttggcactgtccttcgctcaggagcgtcagtggttcctctggcaactggagccggaaagcgcggcctaccatattccgagtgccttgcgcctacgcgggcggctggacgtggatgccttgcaacgcagcttcgacagcctggtcgcgcggcatgaaaccttgcgtacccgcttccggctggagggagggcgttcgtaccagcaggtacaacctgcggttagcgtttccatcgagcgggaacagttcggtgaagaaggcctgatcgaacggatacaggccatcgttgtgcagccattcgacctggaacgggggccgctgctgcgggtgaacctgttgcaactggccgaggacgaccatgtactggtgctggtccagcaccacatcgtgtccgatggttggtcgatgcaggtgatggtcgaggaactggtccagctctatgccgcctatagccaagggctcgacgtggtgttgccagccctgccgatccagtacgcggactacgccctgtggcagcgcagctggatggaggcgggggaaaaggagcgccagttggcgtactggaccggcctgctgggcggcgagcagccggtgctggagttgccgttcgatcggccgcgtccggcccggcagagccatcgtggcgcgcagttgggtttcgagctatcgcgggaactggtcgaggccgtgagagccttggcccagcgtgaaggcgccagtagtttcatgctgttgctggcctcgttccaggcgctgttgtatcgctacagcgggcaggcggatatccgtgtcggtgtgccgatcgccaatcgcaaccgcgtggagaccgagcggctgatcggcttcttcgtcaacacccaggtgctcaaggccgacctggacggtcggatgggcttcgacgagctgctggcccaggcccgccaacgcgcgctggaggcccaggcgcaccaggacctgccgttcgagcaactggtggaagccttgcagccggagcgcaatgccagccacaacccactgttccaggtgctgttcaaccatcagagcgagatacgctcggtgacgcccgaggttcagttggaggacctgcgtctggaaggcctggcctgggacggccagactgcgcagttcgacctgacgctggatattcaggaagacgaaaacggcatctgggcctccttcgactatgccaccgatctgttcgacgcctccaccgtggaacgcctggccggccattggcgcaacctgttgcgcggcatcgtcgccaacccacgacagcggctcggcgagttgccgctgctggataacgccgaacggcaacagattcttcaactgtggaaccagagcgacgccggcttctcggccaagcgcctggtgcacgagttggtggccgaccgcgccggggaaacccccgaggcggtggcggtgaaatttggcgagcaacagctgacttacggcgagctggaccgccaggccaaccgcctggcccatgcattgatcgcccgtggcgtcggccccgaagtgcgcgtggcgattgccatgccacgcagcgccgagatcatggtggcgttcctggcagtgatgaaagccggtggcgtctacgtgccgctggacatcgaatacccgcgtgaccgcctgctgtacatgatgcaggacagccgcgcccgattgctgttgacccattcggcggtgcaacagcgcttgccgattccagacggcctggaagcccttgccgtggaccaggcgcaagcctggtccgctgacgacgacaccgcacccgaggtggcgctggacggcgacaacctggcctacgtgatctacacctccggctccaccggcatgcccaaaggcgtggcggtgtcccacggcccgttggtggcgcacatcattgccaccggcgagcgttatgaaacgtcgccggccgattgcgaactgcacttcatgtcgttcgccttcgacggctcccacgaaggctggatgcacccactgatcaacggcgcgagcgtgctgattcgcgatgacagcctgtggctgccggagtacacctaccagcagatgcatcgccatcacgtgaccatggccgtgtttccgccggtgtacctgcagcagctggccgaacatgccgaacgcgacggtaacccgccgaaggttcgtgtgtactgcttcggcggtgatgccgtggcccaggccagctatgacctggcgtggcgtgcactcaagccgacctacctgttcaacggctacggcccgaccgaaaccgtggtcacgccgttgctgtggaaagcccgccgtggtgacccgtgcggtgccgtctacgcgccgatcggcgggaccatcccggacctgtcctggtacatcctcgaccgtgacctgaacccggtgccgcgcggcgcggtgggcgagctgtacatcggtcgcgccggtctggcgcgcggctacctgaggcggcccgggttgagtgccacccgcttcgtgccgaacccgttccccggcggtgccggcgagcggctgtaccgtaccggcgacctggcacggttccaggcggatggcaatatcgagtacatcgggcgtatcgaccaccaggtgaaggttcgcggcttccgtatcgaactgggtgagatcgaagcggcgctcgccggtctggccggggtacgcgatgccgtggtgctggcccatgacggggtcggcggcacgcaactggtgggatacgtggtggcggactcggcggaggatgccgagcgtctgcgggagtcgctgcgggagtcgctgaagcggcacctgccggactacatggtgccggcgcacctgatgctgctggagcggatgccgctgacggtcaatggcaagctcgaccggcaggcgttgccgcaaccggatgcggccgc

SEQ ID NO: 204 - protein, 977 aa, Artificial Sequence
  Description of Artificial Sequence: Synthetic polypeptide
SRTTDAVSTIPLADRQQPLALSFAQERQWFLWQLEPESAAYHIPSALRLRGRLDVDALQRSFDSLVARHETLRTRFRLEGGRSYQQVQPAVSVSIEREQFGEEGLIERIQAIVVQPFDLERGPLLRVNLLQLAEDDHVLVLVQHHIVSDGWSMQVMVEELVQLYAAYSQGLDVVLPALPIQYADYALWQRSWMEAGEKERQLAYWTGLLGGEQPVLELPFDRPRPARQSHRGAQLGFELSRELVEAVRALAQREGASSFMLLLASFQALLYRYSGQADIRVGVPIANRNRVETERLIGFFVNTQVLKADLDGRMGFDELLAQARQRALEAQAHQDLPFEQLVEALQPERNASHNPLFQVLFNHQSEIRSVTPEVQLEDLRLEGLAWDGQTAQFDLTLDIQEDENGIWASFDYATDLFDASTVERLAGHWRNLLRGIVANPRQRLGELPLLDNAERQQILQLWNQSDAGFSAKRLVHELVADRAGETPEAVAVKFGEQQLTYGELDRQANRLAHALIARGVGPEVRVAIAMPRSAEIMVAFLAVMKAGGVYVPLDIEYPRDRLLYMMQDSRARLLLTHSAVQQRLPIPDGLEALAVDQAQAWSADDDTAPEVALDGDNLAYVIYTSGSTGMPKGVAVSHGPLVAHIIATGERYETSPADCELHFMSFAFDGSHEGWMHPLINGASVLIRDDSLWLPEYTYQQMHRHHVTMAVFPPVYLQQLAEHAERDGNPPKVRVYCFGGDAVAQASYDLAWRALKPTYLFNGYGPTETVVTPLLWKARRGDPCGAVYAPIGGTIPDLSWYILDRDLNPVPRGAVGELYIGRAGLARGYLRRPGLSATRFVPNPFPGGAGERLYRTGDLARFQADGNIEYIGRIDHQVKVRGFRIELGEIEAALAGLAGVRDAVVLAHDGVGGTQLVGYVVADSAEDAERLRESLRESLKRHLPDYMVPAHLMLLERMPLTVNGKLDRQALPQPDAA

SEQ ID NO: 205 - DNA, 2933 bp, Artificial Sequence
  Description of Artificial Sequence: Synthetic polynucleotide
tctagaacgacggatgcggtctcgacgataccgcttgccgatcggcagcaaccgttggcactgtccttcgctcaggagcgtcagtggttcctctggcaactggagccggaaagcgcggcctaccatattccgagtgccttgcgcctacgcgggcggctggacgtggatgccttgcaacgcagcttcgacagcctggtcgcgcggcatgaaaccttgcgtacccgcttccggctggagggagggcgttcgtaccagcaggtacaacctgcggttagcgtttccatcgagcgggaacagttcggtgaagaaggcctgatcgaacggatacaggccatcgttgtgcagccattcgacctggaacgggggccgctgctgcgggtgaacctgttgcaactggccgaggacgaccatgtactggtgctggtccagcaccacatcgtgtccgatggttggtcgatgcaggtgatggtcgaggaactggtccagctctatgccgcctatagccaagggctcgacgtggtgttgccagccctgccgatccagtacgcggactacgccctgtggcagcgcagctggatggaggcgggggaaaaggagcgccagttggcgtactggaccggcctgctgggcggcgagcagccggtgctggagttgccgttcgatcggccgcgtccggcccggcagagccatcgtggcgcgcagttgggtttcgagctatcgcgggaactggtcgaggccgtgagagccttggcccagcgtgaaggcgccagtagtttcatgctgttgctggcctcgttccaggcgctgttgtatcgctacagcgggcaggcggatatccgtgtcggtgtgccgatcgccaatcgcaaccgcgtggagaccgagcggctgatcggcttcttcgtcaacacccaggtgctcaaggccgacctggacggtcggatgggcttcgacgagctgctggcccaggcccgccaacgcgcgctggaggcccaggcgcaccaggacctgccgttcgagcaactggtggaagccttgcagccggagcgcaatgccagccacaacccactgttccaggtgctgttcaaccatcagagcgagatacgctcggtgacgcccgaggttcagttggaggacctgcgtctggaaggcctggcctgggacggccagactgcgcagttcgacctgacgctggatattcaggaagacgaaaacggcatctgggcctccttcgactatgccaccgatctgttcgacgcctccaccgtggaacgcctggccggccattggcgcaacctgttgcgcggcatcgtcgccaacccacgacagcggctcggcgagttgccgctgctggataacgccgaacggcaacagattcttcaactgtggaaccagagcgacgccggcttctcggccaagcgcctggtgcacgagttggtggccgaccgcgccggggaaacccccgaggcggtggcggtgaaatttggcgagcaacagctgacttacggcgagctggaccgccaggccaaccgcctggcccatgcattgatcgcccgtggcgtcggccccgaagtgcgcgtggcgattgccatgccacgcagcgccgagatcatggtggcgttcctggcagtgatgaaagccggtggcgtctacgtgccgctggacatcgaatacccgcgtgaccgcctgctgtacatgatgcaggacagccgcgcccgattgctgttgacccattcggcggtgcaacagcgcttgccgattccagacggcctggaagcccttgccgtggaccaggcgcaagcctggtccgctgacgacgacaccgcacccgaggtggcgctggacggcgacaacctggcctacgtgatctacacctccggctccaccggcatgcccaaaggcgtggcggtgtcccacggcccgttggtggcgcacatcattgccaccggcgagcgttatgaaacgtcgccggccgattgcgaactgcacttcatgtcgttcgccttcgacggctcccacgaaggctggatgcacccactgatcaacggcgcgagcgtgctgattcgcgatgacagcctgtggctgccggagtacacctaccagcagatgcatcgccatcacgtgaccatggccgtgtttccgccggtgtacctgcagcagctggccgaacatgccgaacgcgacggtaacccgccgaaggttcgtgtgtactgcttcggcggtgatgccgtggcccaggccagctatgacctggcgtggcgtgcactcaagccgacctacctgttcaacggctacggcccgaccgaaaccgtggtcacgccgttgctgtggaaagcccgccgtggtgacccgtgcggtgccgtctacgcgccgatcggcacactgctgggcaatcgcagcggctacgtactcgaccgtgacctgaacccggtgccgcgcggcgcggtgggcgagctgtacatcggtcgcgccggtctggcgcgcggctacctgaggcggcccgggttgagtgccacccgcttcgtgccgaacccgttccccggcggtgccggcgagcggctgtaccgtaccggcgacctggcacggttccaggcggatggcaatatcgagtacatcgggcgtatcgaccaccaggtgaaggttcgcggcttccgtatcgaactgggtgagatcgaagcggcgctcgccggtctggccggggtacgcgatgccgtggtgctggcccatgacggggtcggcggcacgcaactggtgggatacgtggtggcggactcggcggaggatgccgagcgtctgcgggagtcgctgcgggagtcgctgaagcggcacctgccggactacatggtgccggcgcacctgatgctgctggagcggatgccgctgacggtcaatggcaagctcgaccggcaggcgttgccgcaaccggatgcggccgc

SEQ ID NO: 206 - protein, 977 aa, Artificial Sequence
  Description of Artificial Sequence: Synthetic polypeptide
SRTTDAVSTIPLADRQQPLALSFAQERQWFLWQLEPESAAYHIPSALRLRGRLDVDALQRSFDSLVARHETLRTRFRLEGGRSYQQVQPAVSVSIEREQFGEEGLIERIQAIVVQPFDLERGPLLRVNLLQLAEDDHVLVLVQHHIVSDGWSMQVMVEELVQLYAAYSQGLDVVLPALPIQYADYALWQRSWMEAGEKERQLAYWTGLLGGEQPVLELPFDRPRPARQSHRGAQLGFELSRELVEAVRALAQREGASSFMLLLASFQALLYRYSGQADIRVGVPIANRNRVETERLIGFFVNTQVLKADLDGRMGFDELLAQARQRALEAQAHQDLPFEQLVEALQPERNASHNPLFQVLFNHQSEIRSVTPEVQLEDLRLEGLAWDGQTAQFDLTLDIQEDENGIWASFDYATDLFDASTVERLAGHWRNLLRGIVANPRQRLGELPLLDNAERQQILQLWNQSDAGFSAKRLVHELVADRAGETPEAVAVKFGEQQLTYGELDRQANRLAHALIARGVGPEVRVAIAMPRSAEIMVAFLAVMKAGGVYVPLDIEYPRDRLLYMMQDSRARLLLTHSAVQQRLPIPDGLEALAVDQAQAWSADDDTAPEVALDGDNLAYVIYTSGSTGMPKGVAVSHGPLVAHIIATGERYETSPADCELHFMSFAFDGSHEGWMHPLINGASVLIRDDSLWLPEYTYQQMHRHHVTMAVFPPVYLQQLAEHAERDGNPPKVRVYCFGGDAVAQASYDLAWRALKPTYLFNGYGPTETVVTPLLWKARRGDPCGAVYAPIGTLLGNRSGYVLDRDLNPVPRGAVGELYIGRAGLARGYLRRPGLSATRFVPNPFPGGAGERLYRTGDLARFQADGNIEYIGRIDHQVKVRGFRIELGEIEAALAGLAGVRDAVVLAHDGVGGTQLVGYVVADSAEDAERLRESLRESLKRHLPDYMVPAHLMLLERMPLTVNGKLDRQALPQPDAA

SEQ ID NO: 207 - DNA, 2933 bp, Artificial Sequence
  Description of Artificial Sequence: Synthetic polynucleotide
tctagaacgacggatgcggtctcgacgataccgcttgccgatcggcagcaaccgttggcactgtccttcgctcaggagcgtcagtggttcctctggcaactggagccggaaagcgcggcctaccatattccgagtgccttgcgcctacgcgggcggctggacgtggatgccttgcaacgcagcttcgacagcctggtcgcgcggcatgaaaccttgcgtacccgcttccggctggagggagggcgttcgtaccagcaggtacaacctgcggttagcgtttccatcgagcgggaacagttcggtgaagaaggcctgatcgaacggatacaggccatcgttgtgcagccattcgacctggaacgggggccgctgctgcgggtgaacctgttgcaactggccgaggacgaccatgtactggtgctggtccagcaccacatcgtgtccgatggttggtcgatgcaggtgatggtcgaggaactggtccagctctatgccgcctatagccaagggctcgacgtggtgttgccagccctgccgatccagtacgcggactacgccctgtggcagcgcagctggatggaggcgggggaaaaggagcgccagttggcgtactggaccggcctgctgggcggcgagcagccggtgctggagttgccgttcgatcggccgcgtccggcccggcagagccatcgtggcgcgcagttgggtttcgagctatcgcgggaactggtcgaggccgtgagagccttggcccagcgtgaaggcgccagtagtttcatgctgttgctggcctcgttccaggcgctgttgtatcgctacagcgggcaggcggatatccgtgtcggtgtgccgatcgccaatcgcaaccgcgtggagaccgagcggctgatcggcttcttcgtcaacacccaggtgctcaaggccgacctggacggtcggatgggcttcgacgagctgctggcccaggcccgccaacgcgcgctggaggcccaggcgcaccaggacctgccgttcgagcaactggtggaagccttgcagccggagcgcaatgccagccacaacccactgttccaggtgctgttcaaccatcagagcgagatacgctcggtgacgcccgaggttcagttggaggacctgcgtctggaaggcctggcctgggacggccagactgcgcagttcgacctgacgctggatattcaggaagacgaaaacggcatctgggcctccttcgactatgccaccgatctgttcgacgcctccaccgtggaacgcctggccggccattggcgcaacctgttgcgcggcatcgtcgccaacccacgacagcggctcggcgagttgccgctgctggataacgccgaacggcaacagattcttcaactgtggaaccagagcgacgccggcttctcggccaagcgcctggtgcacgagttggtggccgaccgcgccggggaaacccccgaggcggtggcggtgaaatttggcgagcaacagctgacttacggcgagctggaccgccaggccaaccgcctggcccatgcattgatcgcccgtggcgtcggccccgaagtgcgcgtggcgattgccatgccacgcagcgccgagatcatggtggcgttcctggcagtgatgaaagccggtggcgtctacgtgccgctggacatcgaatacccgcgtgaccgcctgctgtacatgatgcaggacagccgcgcccgattgctgttgacccattcggcggtgcaacagcgcttgccgattccagacggcctggaagcccttgccgtggaccaggcgcaagcctggtccgctgacgacgacaccgcacccgaggtggcgctggacggcgacaacctggcctacgtgatctacacctccggctccaccggcatgcccaaaggcgtggcggtgtcccacggcccgttggtggcgcacatcattgccaccggcgagcgttatgaaacgtcgccggccgattgcgaactgcacttcatgtcgttcgccttcgacggctcccacgaaggctggatgcacccactgatcaacggcgcgagcgtgctgattcgcgatgacagcctgtggctgccggagtacacctaccagcagatgcatcgccatcacgtgaccatggccgtgtttccgccggtgtacctgcagcagctggccgaacatgccgaacgcgacggtaacccgccgaaggttcgtgtgtactgcttcggcggtgatgccgtggcccaggccagctatgacctggcgtggcgtgcactcaagccgacctacctgttcaacggctacggcccgaccgaaaccgtggtcacgccgttgctgtggaaagcccgccgtggtgacccgtgcggtgccgtctacgcgccgatcggcacactgctgggcaatcgcagcggctacgtattggacgcgcaactcaacctgcaacccatcggcgtagccggtgagttgtacctgggcggcgagggcgtggcccggggttacctgaggcggcccgggttgagtgccacccgcttcgtgccgaacccgttccccggcggtgccggcgagcggctgtaccgtaccggcgacctggcacggttccaggcggatggcaatatcgagtacatcgggcgtatcgaccaccaggtgaaggttcgcggcttccgtatcgaactgggtgagatcgaagcggcgctcgccggtctggccggggtacgcgatgccgtggtgctggcccatgacggggtcggcggcacgcaactggtgggatacgtggtggcggactcggcggaggatgccgagcgtctgcgggagtcgctgcgggagtcgctgaagcggcacctgccggactacatggtgccggcgcacctgatgctgctggagcggatgccgctgacggtcaatggcaagctcgaccggcaggcgttgccgcaaccggatgcggccgc

SEQ ID NO: 208 - protein, 977 aa, Artificial Sequence
  Description of Artificial Sequence: Synthetic polypeptide
SRTTDAVSTIPLADRQQPLALSFAQERQWFLWQLEPESAAYHIPSALRLRGRLDVDALQRSFDSLVARHETLRTRFRLEGGRSYQQVQPAVSVSIEREQFGEEGLIERIQAIVVQPFDLERGPLLRVNLLQLAEDDHVLVLVQHHIVSDGWSMQVMVEELVQLYAAYSQGLDVVLPALPIQYADYALWQRSWMEAGEKERQLAYWTGLLGGEQPVLELPFDRPRPARQSHRGAQLGFELSRELVEAVRALAQREGASSFMLLLASFQALLYRYSGQADIRVGVPIANRNRVETERLIGFFVNTQVLKADLDGRMGFDELLAQARQRALEAQAHQDLPFEQLVEALQPERNASHNPLFQVLFNHQSEIRSVTPEVQLEDLRLEGLAWDGQTAQFDLTLDIQEDENGIWASFDYATDLFDASTVERLAGHWRNLLRGIVANPRQRLGELPLLDNAERQQILQLWNQSDAGFSAKRLVHELVADRAGETPEAVAVKFGEQQLTYGELDRQANRLAHALIARGVGPEVRVAIAMPRSAEIMVAFLAVMKAGGVYVPLDIEYPRDRLLYMMQDSRARLLLTHSAVQQRLPIPDGLEALAVDQAQAWSADDDTAPEVALDGDNLAYVIYTSGSTGMPKGVAVSHGPLVAHIIATGERYETSPADCELHFMSFAFDGSHEGWMHPLINGASVLIRDDSLWLPEYTYQQMHRHHVTMAVFPPVYLQQLAEHAERDGNPPKVRVYCFGGDAVAQASYDLAWRALKPTYLFNGYGPTETVVTPLLWKARRGDPCGAVYAPIGTLLGNRSGYVLDAQLNLQPIGVAGELYLGGEGVARGYLRRPGLSATRFVPNPFPGGAGERLYRTGDLARFQADGNIEYIGRIDHQVKVRGFRIELGEIEAALAGLAGVRDAVVLAHDGVGGTQLVGYVVADSAEDAERLRESLRESLKRHLPDYMVPAHLMLLERMPLTVNGKLDRQALPQPDAA

SEQ ID NO: 209 - DNA, 2930 bp, Artificial Sequence
  Description of Artificial Sequence: Synthetic polynucleotide
tctagaacgacggatgcggtctcgacgataccgcttgccgatcggcagcaaccgttggcactgtccttcgctcaggagcgtcagtggttcctctggcaactggagccggaaagcgcggcctaccatattccgagtgccttgcgcctacgcgggcggctggacgtggatgccttgcaacgcagcttcgacagcctggtcgcgcggcatgaaaccttgcgtacccgcttccggctggagggagggcgttcgtaccagcaggtacaacctgcggttagcgtttccatcgagcgggaacagttcggtgaagaaggcctgatcgaacggatacaggccatcgttgtgcagccattcgacctggaacgggggccgctgctgcgggtgaacctgttgcaactggccgaggacgaccatgtactggtgctggtccagcaccacatcgtgtccgatggttggtcgatgcaggtgatggtcgaggaactggtccagctctatgccgcctatagccaagggctcgacgtggtgttgccagccctgccgatccagtacgcggactacgccctgtggcagcgcagctggatggaggcgggggaaaaggagcgccagttggcgtactggaccggcctgctgggcggcgagcagccggtgctggagttgccgttcgatcggccgcgtccggcccggcagagccatcgtggcgcgcagttgggtttcgagctatcgcgggaactggtcgaggccgtgagagccttggcccagcgtgaaggcgccagtagtttcatgctgttgctggcctcgttccaggcgctgttgtatcgctacagcgggcaggcggatatccgtgtcggtgtgccgatcgccaatcgcaaccgcgtggagaccgagcggctgatcggcttcttcgtcaacacccaggtgctcaaggccgacctggacggtcggatgggcttcgacgagctgctggcccaggcccgccaacgcgcgctggaggcccaggcgcaccaggacctgccgttcgagcaactggtggaagccttgcagccggagcgcaatgccagccacaacccactgttccaggtgctgttcaaccatcagagcgagatacgctcggtgacgcccgaggttcagttggaggacctgcgtctggaaggcctggcctgggacggccagactgcgcagttcgacctgacgctggatattcaggaagacgaaaacggcatctgggcctccttcgactatgccaccgatctgttcgacgcctccaccgtggaacgcctggccggccattggcgcaacctgttgcgcggcatcgtcgccaacccacgacagcggctcggcgagttgccgctgctggataacgccgaacggcaacagattcttcaactgtggaaccagagcgacgccggcttctcggccaagcgcctggtgcacgagttggtggccgaccgcgccggggaaacccccgaggcggtggcggtgaaatttggcgagcaacagctgacttacggcgagctggaccgccaggccaaccgcctggcccatgcattgatcgcccgtggcgtcggccccgaagtgcgcgtggcgattgccatgccacgcagcgccgagatcatggtggcgttcctggcagtgatgaaagccggtggcgtctacgtgccgctggacatcgaatacccgcgtgaccgcctgctgtacatgatgcaggacagccgcgcccgattgctgttgacccattcggcggtgcaacagcgcttgccgattccagacggcctggaagcccttgccgtggaccaggcgcaagcctggtccgctgacgacgacaccgcacccgaggtggcgctggacggcgacaacctggcctacgtgatctacacctccggctccaccggcatgcccaaaggcgtggcggtgtcccacggcccgttggtggcgcacatcattgccaccggcgagcgttatgaaacgtcgccggccgattgcgaactgcacttcatgtcgttcgccttcgacggctcccacgaaggctggatgcacccactgatcaacggcgcgagcgtgctgattcgcgatgacagcctgtggctgccggagtacacctaccagcagatgcatcgccatcacgtgaccatggccgtgtttccgccggtgtacctgcagcagctggccgaacatgccgaacgcgacggtaacccgccgaaggttcgtgtgtactgcttcggcggtgatgccgtggcccaggccagctatgacctggcgtggcgtgcactcaagccgacctacctgttcaacggctacggcccgaccgaaaccgtggtcacgccgttgctgtggaaagcccgccgtggtgacccgtgcggtgccgtctacgcgccgatcggcacactgctgggcaatcgcagcggctacgtattggacgcgcaactcaacctgcaacccatcggcgtagccggtgagttgtacctgggcggcgagggcgtggcccggggttacctggagcgtccggccctgaccgccgagcgcttcgtaccggacccgttcggcaagcccggcagccgcgtgtatcgcagcggcgacttgacccgtggccaggcggatggcaatatcgagtacatcgggcgtatcgaccaccaggtgaaggttcgcggcttccgtatcgaactgggtgagatcgaagcggcgctcgccggtctggccggggtacgcgatgccgtggtgctggcccatgacggggtcggcggcacgcaactggtgggatacgtggtggcggactcggcggaggatgccgagcgtctgcgggagtcgctgcgggagtcgctgaagcggcacctgccggactacatggtgccggcgcacctgatgctgctggagcggatgccgctgacggtcaatggcaagctcgaccggcaggcgttgccgcaaccggatgcggccgc

SEQ ID NO: 210 - protein, 976 aa, Artificial Sequence
  Description of Artificial Sequence: Synthetic polypeptide
SRTTDAVSTIPLADRQQPLALSFAQERQWFLWQLEPESAAYHIPSALRLRGRLDVDALQRSFDSLVARHETLRTRFRLEGGRSYQQVQPAVSVSIEREQFGEEGLIERIQAIVVQPFDLERGPLLRVNLLQLAEDDHVLVLVQHHIVSDGWSMQVMVEELVQLYAAYSQGLDVVLPALPIQYADYALWQRSWMEAGEKERQLAYWTGLLGGEQPVLELPFDRPRPARQSHRGAQLGFELSRELVEAVRALAQREGASSFMLLLASFQALLYRYSGQADIRVGVPIANRNRVETERLIGFFVNTQVLKADLDGRMGFDELLAQARQRALEAQAHQDLPFEQLVEALQPERNASHNPLFQVLFNHQSEIRSVTPEVQLEDLRLEGLAWDGQTAQFDLTLDIQEDENGIWASFDYATDLFDASTVERLAGHWRNLLRGIVANPRQRLGELPLLDNAERQQILQLWNQSDAGFSAKRLVHELVADRAGETPEAVAVKFGEQQLTYGELDRQANRLAHALIARGVGPEVRVAIAMPRSAEIMVAFLAVMKAGGVYVPLDIEYPRDRLLYMMQDSRARLLLTHSAVQQRLPIPDGLEALAVDQAQAWSADDDTAPEVALDGDNLAYVIYTSGSTGMPKGVAVSHGPLVAHIIATGERYETSPADCELHFMSFAFDGSHEGWMHPLINGASVLIRDDSLWLPEYTYQQMHRHHVTMAVFPPVYLQQLAEHAERDGNPPKVRVYCFGGDAVAQASYDLAWRALKPTYLFNGYGPTETVVTPLLWKARRGDPCGAVYAPIGTLLGNRSGYVLDAQLNLQPIGVAGELYLGGEGVARGYLERPALTAERFVPDPFGKPGSRVYRSGDLTRGQADGNIEYIGRIDHQVKVRGFRIELGEIEAALAGLAGVRDAVVLAHDGVGGTQLVGYVVADSAEDAERLRESLRESLKRHLPDYMVPAHLMLLERMPLTVNGKLDRQALPQPDAA

SEQ ID NO: 211 - DNA, 2930 bp, Artificial Sequence
  Description of Artificial Sequence: Synthetic polynucleotide
tctagaacgacggatgcggtctcgacgataccgcttgccgatcggcagcaaccgttggcactgtccttcgctcaggagcgtcagtggttcctctggcaactggagccggaaagcgcggcctaccatattccgagtgccttgcgcctacgcgggcggctggacgtggatgccttgcaacgcagcttcgacagcctggtcgcgcggcatgaaaccttgcgtacccgcttccggctggagggagggcgttcgtaccagcaggtacaacctgcggttagcgtttccatcgagcgggaacagttcggtgaagaaggcctgatcgaacggatacaggccatcgttgtgcagccattcgacctggaacgggggccgctgctgcgggtgaacctgttgcaactggccgaggacgaccatgtactggtgctggtccagcaccacatcgtgtccgatggttggtcgatgcaggtgatggtcgaggaactggtccagctctatgccgcctatagccaagggctcgacgtggtgttgccagccctgccgatccagtacgcggactacgccctgtggcagcgcagctggatggaggcgggggaaaaggagcgccagttggcgtactggaccggcctgctgggcggcgagcagccggtgctggagttgccgttcgatcggccgcgtccggcccggcagagccatcgtggcgcgcagttgggtttcgagctatcgcgggaactggtcgaggccgtgagagccttggcccagcgtgaaggcgccagtagtttcatgctgttgctggcctcgttccaggcgctgttgtatcgctacagcgggcaggcggatatccgtgtcggtgtgccgatcgccaatcgcaaccgcgtggagaccgagcggctgatcggcttcttcgtcaacacccaggtgctcaaggccgacctggacggtcggatgggcttcgacgagctgctggcccaggcccgccaacgcgcgctggaggcccaggcgcaccaggacctgccgttcgagcaactggtggaagccttgcagccggagcgcaatgccagccacaacccactgttccaggtgctgttcaaccatcagagcgagatacgctcggtgacgcccgaggttcagttggaggacctgcgtctggaaggcctggcctgggacggccagactgcgcagttcgacctgacgctggatattcaggaagacgaaaacggcatctgggcctccttcgactatgccaccgatctgttcgacgcctccaccgtggaacgcctggccggccattggcgcaacctgttgcgcggcatcgtcgccaacccacgacagcggctcggcgagttgccgctgctggataacgccgaacggcaacagattcttcaactgtggaaccagagcgacgccggcttctcggccaagcgcctggtgcacgagttggtggccgaccgcgccggggaaacccccgaggcggtggcggtgaaatttggcgagcaacagctgacttacggcgagctggaccgccaggccaaccgcctggcccatgcattgatcgcccgtggcgtcggccccgaagtgcgcgtggcgattgccatgccacgcagcgccgagatcatggtggcgttcctggcagtgatgaaagccggtggcgtctacgtgccgctggacatcgaatacccgcgtgaccgcctgctgtacatgatgcaggacagccgcgcccgattgctgttgacccattcggcggtgcaacagcgcttgccgattccagacggcctggaagcccttgccgtggaccaggcgcaagcctggtccgctgacgacgacaccgcacccgaggtggcgctggacggcgacaacctggcctacgtgatctacacctccggctccaccggcatgcccaaaggcgtggcggtgtcccacggcccgttggtggcgcacatcattgccaccggcgagcgttatgaaacgtcgccggccgattgcgaactgcacttcatgtcgttcgccttcgacggctcccacgaaggctggatgcacccactgatcaacggcgcgagcgtgctgattcgcgatgacagcctgtggctgccggagtacacctaccagcagatgcatcgccatcacgtgaccatggccgtgtttccgccggtgtacctgcagcagctggccgaacatgccgaacgcgacggtaacccgccgaaggttcgtgtgtactgcttcggcggtgatgccgtggcccaggccagctatgacctggcgtggcgtgcactcaagccgacctacctgttcaacggctacggcccgaccgaaaccgtggtcacgccgttgctgtggaaagcccgccgtggtgacccgtgcggtgccgtctacgcgccgatcggcacactgctgggcaatcgcagcggctacgtattggacgcgcaactcaacctgcaacccatcggcgtagccggtgagttgtacctgggcggcgagggcgtggcccggggttacctggagcgtccggccctgaccgccgagcgcttcgtaccggacccgttcggcaagcccggcagccgcgtgtatcgcagcggcgacttgacccgtggccgtccggatggcgtggtggattacctcggccgtatcgaccaccaggtgaaggttcgcggcttccgtatcgaactgggtgagatcgaagcggcgctcgccggtctggccggggtacgcgatgccgtggtgctggcccatgacggggtcggcggcacgcaactggtgggatacgtggtggcggactcggcggaggatgccgagcgtctgcgggagtcgctgcgggagtcgctgaagcggcacctgccggactacatggtgccggcgcacctgatgctgctggagcggatgccgctgacggtcaatggcaagctcgaccggcaggcgttgccgcaaccggatgcggccgc

SEQ ID NO: 212 - protein, 976 aa, Artificial Sequence
  Description of Artificial Sequence: Synthetic polypeptide
SRTTDAVSTIPLADRQQPLALSFAQERQWFLWQLEPESAAYHIPSALRLRGRLDVDALQRSFDSLVARHETLRTRFRLEGGRSYQQVQPAVSVSIEREQFGEEGLIERIQAIVVQPFDLERGPLLRVNLLQLAEDDHVLVLVQHHIVSDGWSMQVMVEELVQLYAAYSQGLDVVLPALPIQYADYALWQRSWMEAGEKERQLAYWTGLLGGEQPVLELPFDRPRPARQSHRGAQLGFELSRELVEAVRALAQREGASSFMLLLASFQALLYRYSGQADIRVGVPIANRNRVETERLIGFFVNTQVLKADLDGRMGFDELLAQARQRALEAQAHQDLPFEQLVEALQPERNASHNPLFQVLFNHQSEIRSVTPEVQLEDLRLEGLAWDGQTAQFDLTLDIQEDENGIWASFDYATDLFDASTVERLAGHWRNLLRGIVANPRQRLGELPLLDNAERQQILQLWNQSDAGFSAKRLVHELVADRAGETPEAVAVKFGEQQLTYGELDRQANRLAHALIARGVGPEVRVAIAMPRSAEIMVAFLAVMKAGGVYVPLDIEYPRDRLLYMMQDSRARLLLTHSAVQQRLPIPDGLEALAVDQAQAWSADDDTAPEVALDGDNLAYVIYTSGSTGMPKGVAVSHGPLVAHIIATGERYETSPADCELHFMSFAFDGSHEGWMHPLINGASVLIRDDSLWLPEYTYQQMHRHHVTMAVFPPVYLQQLAEHAERDGNPPKVRVYCFGGDAVAQASYDLAWRALKPTYLFNGYGPTETVVTPLLWKARRGDPCGAVYAPIGTLLGNRSGYVLDAQLNLQPIGVAGELYLGGEGVARGYLERPALTAERFVPDPFGKPGSRVYRSGDLTRGRPDGVVDYLGRIDHQVKVRGFRIELGEIEAALAGLAGVRDAVVLAHDGVGGTQLVGYVVADSAEDAERLRESLRESLKRHLPDYMVPAHLMLLERMPLTVNGKLDRQALPQPDAA

SEQ ID NO: 213 - DNA, 2930 bp, Artificial Sequence
  Description of Artificial Sequence: Synthetic polynucleotide
tctagaacgacggatgcggtctcgacgataccgcttgccgatcggcagcaaccgttggcactgtccttcgctcaggagcgtcagtggttcctctggcaactggagccggaaagcgcggcctaccatattccgagtgccttgcgcctacgcgggcggctggacgtggatgccttgcaacgcagcttcgacagcctggtcgcgcggcatgaaaccttgcgtacccgcttccggctggagggagggcgttcgtaccagcaggtacaacctgcggttagcgtttccatcgagcgggaacagttcggtgaagaaggcctgatcgaacggatacaggccatcgttgtgcagccattcgacctggaacgggggccgctgctgcgggtgaacctgttgcaactggccgaggacgaccatgtactggtgctggtccagcaccacatcgtgtccgatggttggtcgatgcaggtgatggtcgaggaactggtccagctctatgccgcctatagccaagggctcgacgtggtgttgccagccctgccgatccagtacgcggactacgccctgtggcagcgcagctggatggaggcgggggaaaaggagcgccagttggcgtactggaccggcctgctgggcggcgagcagccggtgctggagttgccgttcgatcggccgcgtccggcccggcagagccatcgtggcgcgcagttgggtttcgagctatcgcgggaactggtcgaggccgtgagagccttggcccagcgtgaaggcgccagtagtttcatgctgttgctggcctcgttccaggcgctgttgtatcgctacagcgggcaggcggatatccgtgtcggtgtgccgatcgccaatcgcaaccgcgtggagaccgagcggctgatcggcttcttcgtcaacacccaggtgctcaaggccgacctggacggtcggatgggcttcgacgagctgctggcccaggcccgccaacgcgcgctggaggcccaggcgcaccaggacctgccgttcgagcaactggtggaagccttgcagccggagcgcaatgccagccacaacccactgttccaggtgctgttcaaccatcagagcgagatacgctcggtgacgcccgaggttcagttggaggacctgcgtctggaaggcctggcctgggacggccagactgcgcagttcgacctgacgctggatattcaggaagacgaaaacggcatctgggcctccttcgactatgccaccgatctgttcgacgcctccaccgtggaacgcctggccggccattggcgcaacctgttgcgcggcatcgtcgccaacccacgacagcggctcggcgagttgccgctgctggataacgccgaacggcaacagattcttcaactgtggaaccagagcgacgccggcttctcggccaagcgcctggtgcacgagttggtggccgaccgcgccggggaaacccccgaggcggtggcggtgaaatttggcgagcaacagctgacttacggcgagctggaccgccaggccaaccgcctggcccatgcattgatcgcccgtggcgtcggccccgaagtgcgcgtggcgattgccatgccacgcagcgccgagatcatggtggcgttcctggcagtgatgaaagccggtggcgtctacgtgccgctggacatcgaatacccgcgtgaccgcctgctgtacatgatgcaggacagccgcgcccgattgctgttgacccattcggcggtgcaacagcgcttgccgattccagacggcctggaagcccttgccgtggaccaggcgcaagcctggtccgctgacgacgacaccgcacccgaggtggcgctggacggcgacaacctggcctacgtgatctacacctccggctccaccggcatgcccaaaggcgtggcggtgtcccacggcccgttggtggcgcacatcattgccaccggcgagcgttatgaaacgtcgccggccgattgcgaactgcacttcatgtcgttcgccttcgacggctcccacgaaggctggatgcacccactgatcaacggcgcgagcgtgctgattcgcgatgacagcctgtggctgccggagtacacctaccagcagatgcatcgccatcacgtgaccatggccgtgtttccgccggtgtacctgcagcagctggccgaacatgccgaacgcgacggtaacccgccgaaggttcgtgtgtactgcttcggcggtgatgccgtggcccaggccagctatgacctggcgtggcgtgcactcaagccgacctacctgttcaacggctacggcccgaccgaaaccgtggtcacgccgttgctgtggaaagcccgccgtggtgacccgtgcggtgccgtctacgcgccgatcggcacactgctgggcaatcgcagcggctacgtattggacgcgcaactcaacctgcaacccatcggcgtagccggtgagttgtacctgggcggcgagggcgtggcccggggttacctggagcgtccggccctgaccgccgagcgcttcgtaccggacccgttcggcaagcccggcagccgcgtgtatcgcagcggcgacttgacccgtggccgtccggatggcgtggtggattacctcggccgtgtcgaccatcaggtgaaggttcgcggcttccgtatcgaactgggtgagatcgaagcggcgctcgccggtctggccggggtacgcgatgccgtggtgctggcccatgacggggtcggcggcacgcaactggtgggatacgtggtggcggactcggcggaggatgccgagcgtctgcgggagtcgctgcgggagtcgctgaagcggcacctgccggactacatggtgccggcgcacctgatgctgctggagcggatgccgctgacggtcaatggcaagctcgaccggcaggcgttgccgcaaccggatgcggccgc

SEQ ID NO: 214 - protein, 976 aa, Artificial Sequence
  Description of Artificial Sequence: Synthetic polypeptide
SRTTDAVSTIPLADRQQPLALSFAQERQWFLWQLEPESAAYHIPSALRLRGRLDVDALQRSFDSLVARHETLRTRFRLEGGRSYQQVQPAVSVSIEREQFGEEGLIERIQAIVVQPFDLERGPLLRVNLLQLAEDDHVLVLVQHHIVSDGWSMQVMVEELVQLYAAYSQGLDVVLPALPIQYADYALWQRSWMEAGEKERQLAYWTGLLGGEQPVLELPFDRPRPARQSHRGAQLGFELSRELVEAVRALAQREGASSFMLLLASFQALLYRYSGQADIRVGVPIANRNRVETERLIGFFVNTQVLKADLDGRMGFDELLAQARQRALEAQAHQDLPFEQLVEALQPERNASHNPLFQVLFNHQSEIRSVTPEVQLEDLRLEGLAWDGQTAQFDLTLDIQEDENGIWASFDYATDLFDASTVERLAGHWRNLLRGIVANPRQRLGELPLLDNAERQQILQLWNQSDAGFSAKRLVHELVADRAGETPEAVAVKFGEQQLTYGELDRQANRLAHALIARGVGPEVRVAIAMPRSAEIMVAFLAVMKAGGVYVPLDIEYPRDRLLYMMQDSRARLLLTHSAVQQRLPIPDGLEALAVDQAQAWSADDDTAPEVALDGDNLAYVIYTSGSTGMPKGVAVSHGPLVAHIIATGERYETSPADCELHFMSFAFDGSHEGWMHPLINGASVLIRDDSLWLPEYTYQQMHRHHVTMAVFPPVYLQQLAEHAERDGNPPKVRVYCFGGDAVAQASYDLAWRALKPTYLFNGYGPTETVVTPLLWKARRGDPCGAVYAPIGTLLGNRSGYVLDAQLNLQPIGVAGELYLGGEGVARGYLERPALTAERFVPDPFGKPGSRVYRSGDLTRGRPDGVVDYLGRVDHQVKVRGFRIELGEIEAALAGLAGVRDAVVLAHDGVGGTQLVGYVVADSAEDAERLRESLRESLKRHLPDYMVPAHLMLLERMPLTVNGKLDRQALPQPDAA

SEQ ID NO: 215 - DNA, 2930 bp, Artificial Sequence
  Description of Artificial Sequence: Synthetic polynucleotide
tctagaacgacggatgcggtctcgacgataccgcttgccgatcggcagcaaccgttggcactgtccttcgctcaggagcgtcagtggttcctctggcaactggagccggaaagcgcggcctaccatattccgagtgccttgcgcctacgcgggcggctggacgtggatgccttgcaacgcagcttcgacagcctggtcgcgcggcatgaaaccttgcgtacccgcttccggctggagggagggcgttcgtaccagcaggtacaacctgcggttagcgtttccatcgagcgggaacagttcggtgaagaaggcctgatcgaacggatacaggccatcgttgtgcagccattcgacctggaacgggggccgctgctgcgggtgaacctgttgcaactggccgaggacgaccatgtactggtgctggtccagcaccacatcgtgtccgatggttggtcgatgcaggtgatggtcgaggaactggtccagctctatgccgcctatagccaagggctcgacgtggtgttgccagccctgccgatccagtacgcggactacgccctgtggcagcgcagctggatggaggcgggggaaaaggagcgccagttggcgtactggaccggcctgctgggcggcgagcagccggtgctggagttgccgttcgatcggccgcgtccggcccggcagagccatcgtggcgcgcagttgggtttcgagctatcgcgggaactggtcgaggccgtgagagccttggcccagcgtgaaggcgccagtagtttcatgctgttgctggcctcgttccaggcgctgttgtatcgctacagcgggcaggcggatatccgtgtcggtgtgccgatcgccaatcgcaaccgcgtggagaccgagcggctgatcggcttcttcgtcaacacccaggtgctcaaggccgacctggacggtcggatgggcttcgacgagctgctggcccaggcccgccaacgcgcgctggaggcccaggcgcaccaggacctgccgttcgagcaactggtggaagccttgcagccggagcgcaatgccagccacaacccactgttccaggtgctgttcaaccatcagagcgagatacgctcggtgacgcccgaggttcagttggaggacctgcgtctggaaggcctggcctgggacggccagactgcgcagttcgacctgacgctggatattcaggaagacgaaaacggcatctgggcctccttcgactatgccaccgatctgttcgacgcctccaccgtggaacgcctggccggccattggcgcaacctgttgcgcggcatcgtcgccaacccacgacagcggctcggcgagttgccgctgctggataacgccgaacggcaacagattcttcaactgtggaaccagagcgacgccggcttctcggccaagcgcctggtgcacgagttggtggccgaccgcgccggggaaacccccgaggcggtggcggtgaaatttggcgagcaacagctgacttacggcgagctggaccgccaggccaaccgcctggcccatgcattgatcgcccgtggcgtcggccccgaagtgcgcgtggcgattgccatgccacgcagcgccgagatcatggtggcgttcctggcagtgatgaaagccggtggcgtctacgtgccgctggacatcgaatacccgcgtgaccgcctgctgtacatgatgcaggacagccgcgcccgattgctgttgacccattcggcggtgcaacagcgcttgccgattccagacggcctggaagcccttgccgtggaccaggcgcaagcctggtccgctgacgacgacaccgcacccgaggtggcgctggacggcgacaacctggcctacgtgatctacacctccggctccaccggcatgcccaaaggcgtggcggtgtcccacggcccgttggtggcgcacatcattgccaccggcgagcgttatgaaacgtcgccggccgattgcgaactgcacttcatgtcgttcgccttcgacggctcccacgaaggctggatgcacccactgatcaacggcgcgagcgtgctgattcgcgatgacagcctgtggctgccggagtacacctaccagcagatgcatcgccatcacgtgaccatggccgtgtttccgccggtgtacctgcagcagctggccgaacatgccgaacgcgacggtaacccgccgaaggttcgtgtgtactgcttcggcggtgatgccgtggcccaggccagctatgacctggcgtggcgtgcactcaagccgacctacctgttcaacggctacggcccgaccgaaaccgtggtcacgccgttgctgtggaaagcccgccgtggtgacccgtgcggtgccgtctacgcgccgatcggcacactgctgggcaatcgcagcggctacgtattggacgcgcaactcaacctgcaacccatcggcgtagccggtgagttgtacctgggcggcgagggcgtggcccggggttacctggagcgtccggccctgaccgccgagcgcttcgtaccggacccgttcggcaagcccggcagccgcgtgtatcgcagcggcgacttgacccgtggccgtccggatggcgtggtggattacctcggccgtgtcgaccatcaggtgaaaatccgtggcttccgtattgagctgggcgagatcgaagcggcgctcgccggtctggccggggtacgcgatgccgtggtgctggcccatgacggggtcggcggcacgcaactggtgggatacgtggtggcggactcggcggaggatgccgagcgtctgcgggagtcgctgcgggagtcgctgaagcggcacctgccggactacatggtgccggcgcacctgatgctgctggagcggatgccgctgacggtcaatggcaagctcgaccggcaggcgttgccgcaaccggatgcggccgc

SEQ ID NO: 216 - protein, 976 aa, Artificial Sequence
  Description of Artificial Sequence: Synthetic polypeptide
SRTTDAVSTIPLADRQQPLALSFAQERQWFLWQLEPESAAYHIPSALRLRGRLDVDALQRSFDSLVARHETLRTRFRLEGGRSYQQVQPAVSVSIEREQFGEEGLIERIQAIVVQPFDLERGPLLRVNLLQLAEDDHVLVLVQHHIVSDGWSMQVMVEELVQLYAAYSQGLDVVLPALPIQYADYALWQRSWMEAGEKERQLAYWTGLLGGEQPVLELPFDRPRPARQSHRGAQLGFELSRELVEAVRALAQREGASSFMLLLASFQALLYRYSGQADIRVGVPIANRNRVETERLIGFFVNTQVLKADLDGRMGFDELLAQARQRALEAQAHQDLPFEQLVEALQPERNASHNPLFQVLFNHQSEIRSVTPEVQLEDLRLEGLAWDGQTAQFDLTLDIQEDENGIWASFDYATDLFDASTVERLAGHWRNLLRGIVANPRQRLGELPLLDNAERQQILQLWNQSDAGFSAKRLVHELVADRAGETPEAVAVKFGEQQLTYGELDRQANRLAHALIARGVGPEVRVAIAMPRSAEIMVAFLAVMKAGGVYVPLDIEYPRDRLLYMMQDSRARLLLTHSAVQQRLPIPDGLEALAVDQAQAWSADDDTAPEVALDGDNLAYVIYTSGSTGMPKGVAVSHGPLVAHIIATGERYETSPADCELHFMSFAFDGSHEGWMHPLINGASVLIRDDSLWLPEYTYQQMHRHHVTMAVFPPVYLQQLAEHAERDGNPPKVRVYCFGGDAVAQASYDLAWRALKPTYLFNGYGPTETVVTPLLWKARRGDPCGAVYAPIGTLLGNRSGYVLDAQLNLQPIGVAGELYLGGEGVARGYLERPALTAERFVPDPFGKPGSRVYRSGDLTRGRPDGVVDYLGRVDHQVKIRGFRIELGEIEAALAGLAGVRDAVVLAHDGVGGTQLVGYVVADSAEDAERLRESLRESLKRHLPDYMVPAHLMLLERMPLTVNGKLDRQALPQPDAA

SEQ ID NO: 217 - DNA, 2912 bp, Artificial Sequence
  Description of Artificial Sequence: Synthetic polynucleotide
tctagaacgacggatgcggtctcgacgataccgcttgccgatcggcagcaaccgttggcactgtccttcgctcaggagcgtcagtggttcctctggcaactggagccggaaagcgcggcctaccatattccgagtgccttgcgcctacgcgggcggctggacgtggatgccttgcaacgcagcttcgacagcctggtcgcgcggcatgaaaccttgcgtacccgcttccggctggagggagggcgttcgtaccagcaggtacaacctgcggttagcgtttccatcgagcgggaacagttcggtgaagaaggcctgatcgaacggatacaggccatcgttgtgcagccattcgacctggaacgggggccgctgctgcgggtgaacctgttgcaactggccgaggacgaccatgtactggtgctggtccagcaccacatcgtgtccgatggttggtcgatgcaggtgatggtcgaggaactggtccagctctatgccgcctatagccaagggctcgacgtggtgttgccagccctgccgatccagtacgcggactacgccctgtggcagcgcagctggatggaggcgggggaaaaggagcgccagttggcgtactggaccggcctgctgggcggcgagcagccggtgctggagttgccgttcgatcggccgcgtccggcccggcagagccatcgtggcgcgcagttgggtttcgagctatcgcgggaactggtcgaggccgtgagagccttggcccagcgtgaaggcgccagtagtttcatgctgttgctggcctcgttccaggcgctgttgtatcgctacagcgggcaggcggatatccgtgtcggtgtgccgatcgccaatcgcaaccgcgtggagaccgagcggctgatcggcttcttcgtcaacacccaggtgctcaaggccgacctggacggtcggatgggcttcgacgagctgctggcccaggcccgccaacgcgcgctggaggcccaggcgcaccaggacctgccgttcgagcaactggtggaagccttgcagccggagcgcaatgccagccacaacccactgttccaggtgctgttcaaccatcagagcgagatacgctcggtgacgcccgaggttcagttggaggacctgcgtctggaaggcctggcctgggacggccagactgcgcagttcgacctgacgctggatattcaggaagacgaaaacggcatctgggcctccttcgactatgccaccgatctgttcgacgcctccaccgtggaacgcctggccggccattggcgcaacctgttgcgcggcatcgtcgccaacccacgacagcggctcggcgagttgccgctgctggatggtgccgagtcccgacggatgctcgtcgagtggaacgacacgcgggaagcgtacgccgccgaccggcgcgtccacgaactattcgaggctcaggcggcgcggacgccggacgcgtcggcggtcgagtcgcaagggcgcgcgctgagttatgccgagctgaatagacgggccaatcaactggcccgccatctgcgacgcatgggcgtcgggccggaagtgctggtcggcatctgcgtcgagaagagcgtcgagatgctggtcgggcttttgggcatactcaaagccgggggggcgtatgtcccgctcgacccggcgttcccggccgagcggctcgccttcatggcggaagacgcggaactgcccgtcctgctgaccgaatcaagactgacggcagtcgtccccccgaaccccacgcgccgtaccgtccttctcgattcggattgggaactcatcgcgggcgagagtggggacgacctgtccgacaccggcggcggcgagaatacggcttacgtgatctacacctcgggctcgaccggcagaccgaagggcgtacaggtttcacaccgcgcgttggttaatttcctgcactcgatgcgcgggcggcccgggatcgaagcaggcgacacgctgctcgccgtcaccaccctctccttcgacatcgccgggctggagctttacctgccgctcttgacgggcgcgcgcgtcgtcgtcgccggccgggaagaactctcagacggagccttgttgtcggagaggataagccgctcgggcgcgaccgtgatgcaggcgaccccggccacctggcgtctgctgctcggggcgggatggcggggcaagagcgatctgcgcatcttctgcggcggcgaggcgctcgcgcgcgaactggcgaatcagttgttggaaaagtgcgccgagctttggaacctctacggcccgacggagacgaccatctggtcggcgattcatcgagtcgagacgacggaaggggccgtgtccgtcggcgggaccatcccggacctgtcctggtacatcctcgaccgtgacctgaacccggtgccgcgcggcgcggtgggcgagctgtacatcggtcgcgccggtctggcgcgcggctacctgaggcggcccgggttgagtgccacccgcttcgtgccgaacccgttccccggcggtgccggcgagcggctgtaccgtaccggcgacctggcacggttccaggcggatggcaatatcgagtacatcgggcgtatcgaccaccaggtgaaggttcgcggcttccgtatcgaactgggtgagatcgaagcggcgctcgccggtctggccggggtacgcgatgccgtggtgctggcccatgacggggtcggcggcacgcaactggtgggatacgtggtggcggactcggcggaggatgccgagcgtctgcgggagtcgctgcgggagtcgctgaagcggcacctgccggactacatggtgccggcgcacctgatgctgctggagcggatgccgctgacggtcaatggcaagctcgaccggcaggcgttgccgcaaccggatgcggccgc

SEQ ID NO: 218 - protein, 970 aa, Artificial Sequence
  Description of Artificial Sequence: Synthetic polypeptide
SRTTDAVSTIPLADRQQPLALSFAQERQWFLWQLEPESAAYHIPSALRLRGRLDVDALQRSFDSLVARHETLRTRFRLEGGRSYQQVQPAVSVSIEREQFGEEGLIERIQAIVVQPFDLERGPLLRVNLLQLAEDDHVLVLVQHHIVSDGWSMQVMVEELVQLYAAYSQGLDVVLPALPIQYADYALWQRSWMEAGEKERQLAYWTGLLGGEQPVLELPFDRPRPARQSHRGAQLGFELSRELVEAVRALAQREGASSFMLLLASFQALLYRYSGQADIRVGVPIANRNRVETERLIGFFVNTQVLKADLDGRMGFDELLAQARQRALEAQAHQDLPFEQLVEALQPERNASHNPLFQVLFNHQSEIRSVTPEVQLEDLRLEGLAWDGQTAQFDLTLDIQEDENGIWASFDYATDLFDASTVERLAGHWRNLLRGIVANPRQRLGELPLLDGAESRRMLVEWNDTREAYAADRRVHELFEAQAARTPDASAVESQGRALSYAELNRRANQLARHLRRMGVGPEVLVGICVEKSVEMLVGLLGILKAGGAYVPLDPAFPAERLAFMAEDAELPVLLTESRLTAVVPPNPTRRTVLLDSDWELIAGESGDDLSDTGGGENTAYVIYTSGSTGRPKGVQVSHRALVNFLHSMRGRPGIEAGDTLLAVTTLSFDIAGLELYLPLLTGARVVVAGREELSDGALLSERISRSGATVMQATPATWRLLLGAGWRGKSDLRIFCGGEALARELANQLLEKCAELWNLYGPTETTIWSAIHRVETTEGAVSVGGTIPDLSWYILDRDLNPVPRGAVGELYIGRAGLARGYLRRPGLSATRFVPNPFPGGAGERLYRTGDLARFQADGNIEYIGRIDHQVKVRGFRIELGEIEAALAGLAGVRDAVVLAHDGVGGTQLVGYVVADSAEDAERLRESLRESLKRHLPDYMVPAHLMLLERMPLTVNGKLDRQALPQPDAA

SEQ ID NO: 219 - DNA, 2912 bp, Artificial Sequence
  Description of Artificial Sequence: Synthetic polynucleotide
tctagaacgacggatgcggtctcgacgataccgcttgccgatcggcagcaaccgttggcactgtccttcgctcaggagcgtcagtggttcctctggcaactggagccggaaagcgcggcctaccatattccgagtgccttgcgcctacgcgggcggctggacgtggatgccttgcaacgcagcttcgacagcctggtcgcgcggcatgaaaccttgcgtacccgcttccggctggagggagggcgttcgtaccagcaggtacaacctgcggttagcgtttccatcgagcgggaacagttcggtgaagaaggcctgatcgaacggatacaggccatcgttgtgcagccattcgacctggaacgggggccgctgctgcgggtgaacctgttgcaactggccgaggacgaccatgtactggtgctggtccagcaccacatcgtgtccgatggttggtcgatgcaggtgatggtcgaggaactggtccagctctatgccgcctatagccaagggctcgacgtggtgttgccagccctgccgatccagtacgcggactacgccctgtggcagcgcagctggatggaggcgggggaaaaggagcgccagttggcgtactggaccggcctgctgggcggcgagcagccggtgctggagttgccgttcgatcggccgcgtccggcccggcagagccatcgtggcgcgcagttgggtttcgagctatcgcgggaactggtcgaggccgtgagagccttggcccagcgtgaaggcgccagtagtttcatgctgttgctggcctcgttccaggcgctgttgtatcgctacagcgggcaggcggatatccgtgtcggtgtgccgatcgccaatcgcaaccgcgtggagaccgagcggctgatcggcttcttcgtcaacacccaggtgctcaaggccgacctggacggtcggatgggcttcgacgagctgctggcccaggcccgccaacgcgcgctggaggcccaggcgcaccaggacctgccgttcgagcaactggtggaagccttgcagccggagcgcaatgccagccacaacccactgttccaggtgctgttcaaccatcagagcgagatacgctcggtgacgcccgaggttcagttggaggacctgcgtctggaaggcctggcctgggacggccagactgcgcagttcgacctgacgctggatattcaggaagacgaaaacggcatctgggcctccttcgactatgccaccgatctgttcgacgcctccaccgtggaacgcctggccggccattggcgcaacctgttgcgcggcatcgtcgccaacccacgacagcggctcggcgagttgccgctgctggatggtgccgagtcccgacggatgctcgtcgagtggaacgacacgcgggaagcgtacgccgccgaccggcgcgtccacgaactattcgaggctcaggcggcgcggacgccggacgcgtcggcggtcgagtcgcaagggcgcgcgctgagttatgccgagctgaatagacgggccaatcaactggcccgccatctgcgacgcatgggcgtcgggccggaagtgctggtcggcatctgcgtcgagaagagcgtcgagatgctggtcgggcttttgggcatactcaaagccgggggggcgtatgtcccgctcgacccggcgttcccggccgagcggctcgccttcatggcggaagacgcggaactgcccgtcctgctgaccgaatcaagactgacggcagtcgtccccccgaaccccacgcgccgtaccgtccttctcgattcggattgggaactcatcgcgggcgagagtggggacgacctgtccgacaccggcggcggcgagaatacggcttacgtgatctacacctcgggctcgaccggcagaccgaagggcgtacaggtttcacaccgcgcgttggttaatttcctgcactcgatgcgcgggcggcccgggatcgaagcaggcgacacgctgctcgccgtcaccaccctctccttcgacatcgccgggctggagctttacctgccgctcttgacgggcgcgcgcgtcgtcgtcgccggccgggaagaactctcagacggagccttgttgtcggagaggataagccgctcgggcgcgaccgtgatgcaggcgaccccggccacctggcgtctgctgctcggggcgggatggcggggcaagagcgatctgcgcatcttctgcggcggcgaggcgctcgcgcgcgaactggcgaatcagttgttggaaaagtgcgccgagctttggaacctctacggcccgacggagacgaccatctggtcggcgattcatcgagtcgagacgacggaaggggccgtgtccgtcggtcgcccgatagccaacacgcgggtctacgtgctcgaccgtgacctgaacccggtgccgcgcggcgcggtgggcgagctgtacatcggtcgcgccggtctggcgcgcggctacctgaggcggcccgggttgagtgccacccgcttcgtgccgaacccgttccccggcggtgccggcgagcggctgtaccgtaccggcgacctggcacggttccaggcggatggcaatatcgagtacatcgggcgtatcgaccaccaggtgaaggttcgcggcttccgtatcgaactgggtgagatcgaagcggcgctcgccggtctggccggggtacgcgatgccgtggtgctggcccatgacggggtcggcggcacgcaactggtgggatacgtggtggcggactcggcggaggatgccgagcgtctgcgggagtcgctgcgggagtcgctgaagcggcacctgccggactacatggtgccggcgcacctgatgctgctggagcggatgccgctgacggtcaatggcaagctcgaccggcaggcgttgccgcaaccggatgcggccgc

SEQ ID NO: 220 - protein, 970 aa, Artificial Sequence
  Description of Artificial Sequence: Synthetic polypeptide
SRTTDAVSTIPLADRQQPLALSFAQERQWFLWQLEPESAAYHIPSALRLRGRLDVDALQRSFDSLVARHETLRTRFRLEGGRSYQQVQPAVSVSIEREQFGEEGLIERIQAIVVQPFDLERGPLLRVNLLQLAEDDHVLVLVQHHIVSDGWSMQVMVEELVQLYAAYSQGLDVVLPALPIQYADYALWQRSWMEAGEKERQLAYWTGLLGGEQPVLELPFDRPRPARQSHRGAQLGFELSRELVEAVRALAQREGASSFMLLLASFQALLYRYSGQADIRVGVPIANRNRVETERLIGFFVNTQVLKADLDGRMGFDELLAQARQRALEAQAHQDLPFEQLVEALQPERNASHNPLFQVLFNHQSEIRSVTPEVQLEDLRLEGLAWDGQTAQFDLTLDIQEDENGIWASFDYATDLFDASTVERLAGHWRNLLRGIVANPRQRLGELPLLDGAESRRMLVEWNDTREAYAADRRVHELFEAQAARTPDASAVESQGRALSYAELNRRANQLARHLRRMGVGPEVLVGICVEKSVEMLVGLLGILKAGGAYVPLDPAFPAERLAFMAEDAELPVLLTESRLTAVVPPNPTRRTVLLDSDWELIAGESGDDLSDTGGGENTAYVIYTSGSTGRPKGVQVSHRALVNFLHSMRGRPGIEAGDTLLAVTTLSFDIAGLELYLPLLTGARVVVAGREELSDGALLSERISRSGATVMQATPATWRLLLGAGWRGKSDLRIFCGGEALARELANQLLEKCAELWNLYGPTETTIWSAIHRVETTEGAVSVGRPIANTRVYVLDRDLNPVPRGAVGELYIGRAGLARGYLRRPGLSATRFVPNPFPGGAGERLYRTGDLARFQADGNIEYIGRIDHQVKVRGFRIELGEIEAALAGLAGVRDAVVLAHDGVGGTQLVGYVVADSAEDAERLRESLRESLKRHLPDYMVPAHLMLLERMPLTVNGKLDRQALPQPDAA

SEQ ID NO: 221 - DNA, 2912 bp, Artificial Sequence
  Description of Artificial Sequence: Synthetic polynucleotide
tctagaacgacggatgcggtctcgacgataccgcttgccgatcggcagcaaccgttggcactgtccttcgctcaggagcgtcagtggttcctctggcaactggagccggaaagcgcggcctaccatattccgagtgccttgcgcctacgcgggcggctggacgtggatgccttgcaacgcagcttcgacagcctggtcgcgcggcatgaaaccttgcgtacccgcttccggctggagggagggcgttcgtaccagcaggtacaacctgcggttagcgtttccatcgagcgggaacagttcggtgaagaaggcctgatcgaacggatacaggccatcgttgtgcagccattcgacctggaacgggggccgctgctgcgggtgaacctgttgcaactggccgaggacgaccatgtactggtgctggtccagcaccacatcgtgtccgatggttggtcgatgcaggtgatggtcgaggaactggtccagctctatgccgcctatagccaagggctcgacgtggtgttgccagccctgccgatccagtacgcggactacgccctgtggcagcgcagctggatggaggcgggggaaaaggagcgccagttggcgtactggaccggcctgctgggcggcgagcagccggtgctggagttgccgttcgatcggccgcgtccggcccggcagagccatcgtggcgcgcagttgggtttcgagctatcgcgggaactggtcgaggccgtgagagccttggcccagcgtgaaggcgccagtagtttcatgctgttgctggcctcgttccaggcgctgttgtatcgctacagcgggcaggcggatatccgtgtcggtgtgccgatcgccaatcgcaaccgcgtggagaccgagcggctgatcggcttcttcgtcaacacccaggtgctcaaggccgacctggacggtcggatgggcttcgacgagctgctggcccaggcccgccaacgcgcgctggaggcccaggcgcaccaggacctgccgttcgagcaactggtggaagccttgcagccggagcgcaatgccagccacaacccactgttccaggtgctgttcaaccatcagagcgagatacgctcggtgacgcccgaggttcagttggaggacctgcgtctggaaggcctggcctgggacggccagactgcgcagttcgacctgacgctggatattcaggaagacgaaaacggcatctgggcctccttcgactatgccaccgatctgttcgacgcctccaccgtggaacgcctggccggccattggcgcaacctgttgcgcggcatcgtcgccaacccacgacagcggctcggcgagttgccgctgctggatggtgccgagtcccgacggatgctcgtcgagtggaacgacacgcgggaagcgtacgccgccgaccggcgcgtccacgaactattcgaggctcaggcggcgcggacgccggacgcgtcggcggtcgagtcgcaagggcgcgcgctgagttatgccgagctgaatagacgggccaatcaactggcccgccatctgcgacgcatgggcgtcgggccggaagtgctggtcggcatctgcgtcgagaagagcgtcgagatgctggtcgggcttttgggcatactcaaagccgggggggcgtatgtcccgctcgacccggcgttcccggccgagcggctcgccttcatggcggaagacgcggaactgcccgtcctgctgaccgaatcaagactgacggcagtcgtccccccgaaccccacgcgccgtaccgtccttctcgattcggattgggaactcatcgcgggcgagagtggggacgacctgtccgacaccggcggcggcgagaatacggcttacgtgatctacacctcgggctcgaccggcagaccgaagggcgtacaggtttcacaccgcgcgttggttaatttcctgcactcgatgcgcgggcggcccgggatcgaagcaggcgacacgctgctcgccgtcaccaccctctccttcgacatcgccgggctggagctttacctgccgctcttgacgggcgcgcgcgtcgtcgtcgccggccgggaagaactctcagacggagccttgttgtcggagaggataagccgctcgggcgcgaccgtgatgcaggcgaccccggccacctggcgtctgctgctcggggcgggatggcggggcaagagcgatctgcgcatcttctgcggcggcgaggcgctcgcgcgcgaactggcgaatcagttgttggaaaagtgcgccgagctttggaacctctacggcccgacggagacgaccatctggtcggcgattcatcgagtcgagacgacggaaggggccgtgtccgtcggtcgcccgatagccaacacgcgggtctacgtgctcgacaagaatctgcgccccgtgcccgccggagtcccgggcgaactgctcatcggcggcgacggattagcccgggggtatctgaggcggcccgggttgagtgccacccgcttcgtgccgaacccgttccccggcggtgccggcgagcggctgtaccgtaccggcgacctggcacggttccaggcggatggcaatatcgagtacatcgggcgtatcgaccaccaggtgaaggttcgcggcttccgtatcgaactgggtgagatcgaagcggcgctcgccggtctggccggggtacgcgatgccgtggtgctggcccatgacggggtcggcggcacgcaactggtgggatacgtggtggcggactcggcggaggatgccgagcgtctgcgggagtcgctgcgggagtcgctgaagcggcacctgccggactacatggtgccggcgcacctgatgctgctggagcggatgccgctgacggtcaatggcaagctcgaccggcaggcgttgccgcaaccggatgcggccgc

SEQ ID NO: 222 - protein, 970 aa, Artificial Sequence
  Description of Artificial Sequence: Synthetic polypeptide
SRTTDAVSTIPLADRQQPLALSFAQERQWFLWQLEPESAAYHIPSALRLRGRLDVDALQRSFDSLVARHETLRTRFRLEGGRSYQQVQPAVSVSIEREQFGEEGLIERIQAIVVQPFDLERGPLLRVNLLQLAEDDHVLVLVQHHIVSDGWSMQVMVEELVQLYAAYSQGLDVVLPALPIQYADYALWQRSWMEAGEKERQLAYWTGLLGGEQPVLELPFDRPRPARQSHRGAQLGFELSRELVEAVRALAQREGASSFMLLLASFQALLYRYSGQADIRVGVPIANRNRVETERLIGFFVNTQVLKADLDGRMGFDELLAQARQRALEAQAHQDLPFEQLVEALQPERNASHNPLFQVLFNHQSEIRSVTPEVQLEDLRLEGLAWDGQTAQFDLTLDIQEDENGIWASFDYATDLFDASTVERLAGHWRNLLRGIVANPRQRLGELPLLDGAESRRMLVEWNDTREAYAADRRVHELFEAQAARTPDASAVESQGRALSYAELNRRANQLARHLRRMGVGPEVLVGICVEKSVEMLVGLLGILKAGGAYVPLDPAFPAERLAFMAEDAELPVLLTESRLTAVVPPNPTRRTVLLDSDWELIAGESGDDLSDTGGGENTAYVIYTSGSTGRPKGVQVSHRALVNFLHSMRGRPGIEAGDTLLAVTTLSFDIAGLELYLPLLTGARVVVAGREELSDGALLSERISRSGATVMQATPATWRLLLGAGWRGKSDLRIFCGGEALARELANQLLEKCAELWNLYGPTETTIWSAIHRVETTEGAVSVGRPIANTRVYVLDKNLRPVPAGVPGELLIGGDGLARGYLRRPGLSATRFVPNPFPGGAGERLYRTGDLARFQADGNIEYIGRIDHQVKVRGFRIELGEIEAALAGLAGVRDAVVLAHDGVGGTQLVGYVVADSAEDAERLRESLRESLKRHLPDYMVPAHLMLLERMPLTVNGKLDRQALPQPDAA

SEQ ID NO: 223 - DNA, 2912 bp, Artificial Sequence
  Description of Artificial Sequence: Synthetic polynucleotide
tctagaacgacggatgcggtctcgacgataccgcttgccgatcggcagcaaccgttggcactgtccttcgctcaggagcgtcagtggttcctctggcaactggagccggaaagcgcggcctaccatattccgagtgccttgcgcctacgcgggcggctggacgtggatgccttgcaacgcagcttcgacagcctggtcgcgcggcatgaaaccttgcgtacccgcttccggctggagggagggcgttcgtaccagcaggtacaacctgcggttagcgtttccatcgagcgggaacagttcggtgaagaaggcctgatcgaacggatacaggccatcgttgtgcagccattcgacctggaacgggggccgctgctgcgggtgaacctgttgcaactggccgaggacgaccatgtactggtgctggtccagcaccacatcgtgtccgatggttggtcgatgcaggtgatggtcgaggaactggtccagctctatgccgcctatagccaagggctcgacgtggtgttgccagccctgccgatccagtacgcggactacgccctgtggcagcgcagctggatggaggcgggggaaaaggagcgccagttggcgtactggaccggcctgctgggcggcgagcagccggtgctggagttgccgttcgatcggccgcgtccggcccggcagagccatcgtggcgcgcagttgggtttcgagctatcgcgggaactggtcgaggccgtgagagccttggcccagcgtgaaggcgccagtagtttcatgctgttgctggcctcgttccaggcgctgttgtatcgctacagcgggcaggcggatatccgtgtcggtgtgccgatcgccaatcgcaaccgcgtggagaccgagcggctgatcggcttcttcgtcaacacccaggtgctcaaggccgacctggacggtcggatgggcttcgacgagctgctggcccaggcccgccaacgcgcgctggaggcccaggcgcaccaggacctgccgttcgagcaactggtggaagccttgcagccggagcgcaatgccagccacaacccactgttccaggtgctgttcaaccatcagagcgagatacgctcggtgacgcccgaggttcagttggaggacctgcgtctggaaggcctggcctgggacggccagactgcgcagttcgacctgacgctggatattcaggaagacgaaaacggcatctgggcctccttcgactatgccaccgatctgttcgacgcctccaccgtggaacgcctggccggccattggcgcaacctgttgcgcggcatcgtcgccaacccacgacagcggctcggcgagttgccgctgctggatggtgccgagtcccgacggatgctcgtcgagtggaacgacacgcgggaagcgtacgccgccgaccggcgcgtccacgaactattcgaggctcaggcggcgcggacgccggacgcgtcggcggtcgagtcgcaagggcgcgcgctgagttatgccgagctgaatagacgggccaatcaactggcccgccatctgcgacgcatgggcgtcgggccggaagtgctggtcggcatctgcgtcgagaagagcgtcgagatgctggtcgggcttttgggcatactcaaagccgggggggcgtatgtcccgctcgacccggcgttcccggccgagcggctcgccttcatggcggaagacgcggaactgcccgtcctgctgaccgaatcaagactgacggcagtcgtccccccgaaccccacgcgccgtaccgtccttctcgattcggattgggaactcatcgcgggcgagagtggggacgacctgtccgacaccggcggcggcgagaatacggcttacgtgatctacacctcgggctcgaccggcagaccgaagggcgtacaggtttcacaccgcgcgttggttaatttcctgcactcgatgcgcgggcggcccgggatcgaagcaggcgacacgctgctcgccgtcaccaccctctccttcgacatcgccgggctggagctttacctgccgctcttgacgggcgcgcgcgtcgtcgtcgccggccgggaagaactctcagacggagccttgttgtcggagaggataagccgctcgggcgcgaccgtgatgcaggcgaccccggccacctggcgtctgctgctcggggcgggatggcggggcaagagcgatctgcgcatcttctgcggcggcgaggcgctcgcgcgcgaactggcgaatcagttgttggaaaagtgcgccgagctttggaacctctacggcccgacggagacgaccatctggtcggcgattcatcgagtcgagacgacggaaggggccgtgtccgtcggtcgcccgatagccaacacgcgggtctacgtgctcgacaagaatctgcgccccgtgcccgccggagtcccgggcgaactgctcatcggcggcgacggattagcccgggggtatctgaatcgccccgacctgacggccgagaagttcgtgcccgacccgttcggcgatgcccccggcgcgcggctctaccgcacgggcgacctcgcgcgttaccaggcggatggcaatatcgagtacatcgggcgtatcgaccaccaggtgaaggttcgcggcttccgtatcgaactgggtgagatcgaagcggcgctcgccggtctggccggggtacgcgatgccgtggtgctggcccatgacggggtcggcggcacgcaactggtgggatacgtggtggcggactcggcggaggatgccgagcgtctgcgggagtcgctgcgggagtcgctgaagcggcacctgccggactacatggtgccggcgcacctgatgctgctggagcggatgccgctgacggtcaatggcaagctcgaccggcaggcgttgccgcaaccggatgcggccgc

SEQ ID NO: 224 - protein, 970 aa, Artificial Sequence
  Description of Artificial Sequence: Synthetic polypeptide
SRTTDAVSTIPLADRQQPLALSFAQERQWFLWQLEPESAAYHIPSALRLRGRLDVDALQRSFDSLVARHETLRTRFRLEGGRSYQQVQPAVSVSIEREQFGEEGLIERIQAIVVQPFDLERGPLLRVNLLQLAEDDHVLVLVQHHIVSDGWSMQVMVEELVQLYAAYSQGLDVVLPALPIQYADYALWQRSWMEAGEKERQLAYWTGLLGGEQPVLELPFDRPRPARQSHRGAQLGFELSRELVEAVRALAQREGASSFMLLLASFQALLYRYSGQADIRVGVPIANRNRVETERLIGFFVNTQVLKADLDGRMGFDELLAQARQRALEAQAHQDLPFEQLVEALQPERNASHNPLFQVLFNHQSEIRSVTPEVQLEDLRLEGLAWDGQTAQFDLTLDIQEDENGIWASFDYATDLFDASTVERLAGHWRNLLRGIVANPRQRLGELPLLDGAESRRMLVEWNDTREAYAADRRVHELFEAQAARTPDASAVESQGRALSYAELNRRANQLARHLRRMGVGPEVLVGICVEKSVEMLVGLLGILKAGGAYVPLDPAFPAERLAFMAEDAELPVLLTESRLTAVVPPNPTRRTVLLDSDWELIAGESGDDLSDTGGGENTAYVIYTSGSTGRPKGVQVSHRALVNFLHSMRGRPGIEAGDTLLAVTTLSFDIAGLELYLPLLTGARVVVAGREELSDGALLSERISRSGATVMQATPATWRLLLGAGWRGKSDLRIFCGGEALARELANQLLEKCAELWNLYGPTETTIWSAIHRVETTEGAVSVGRPIANTRVYVLDKNLRPVPAGVPGELLIGGDGLARGYLNRPDLTAEKFVPDPFGDAPGARLYRTGDLARYQADGNIEYIGRIDHQVKVRGFRIELGEIEAALAGLAGVRDAVVLAHDGVGGTQLVGYVVADSAEDAERLRESLRESLKRHLPDYMVPAHLMLLERMPLTVNGKLDRQALPQPDAA

SEQ ID NO: 225 - DNA, 2912 bp, Artificial Sequence
  Description of Artificial Sequence: Synthetic polynucleotide
tctagaacgacggatgcggtctcgacgataccgcttgccgatcggcagcaaccgttggcactgtccttcgctcaggagcgtcagtggttcctctggcaactggagccggaaagcgcggcctaccatattccgagtgccttgcgcctacgcgggcggctggacgtggatgccttgcaacgcagcttcgacagcctggtcgcgcggcatgaaaccttgcgtacccgcttccggctggagggagggcgttcgtaccagcaggtacaacctgcggttagcgtttccatcgagcgggaacagttcggtgaagaaggcctgatcgaacggatacaggccatcgttgtgcagccattcgacctggaacgggggccgctgctgcgggtgaacctgttgcaactggccgaggacgaccatgtactggtgctggtccagcaccacatcgtgtccgatggttggtcgatgcaggtgatggtcgaggaactggtccagctctatgccgcctatagccaagggctcgacgtggtgttgccagccctgccgatccagtacgcggactacgccctgtggcagcgcagctggatggaggcgggggaaaaggagcgccagttggcgtactggaccggcctgctgggcggcgagcagccggtgctggagttgccgttcgatcggccgcgtccggcccggcagagccatcgtggcgcgcagttgggtttcgagctatcgcgggaactggtcgaggccgtgagagccttggcccagcgtgaaggcgccagtagtttcatgctgttgctggcctcgttccaggcgctgttgtatcgctacagcgggcaggcggatatccgtgtcggtgtgccgatcgccaatcgcaaccgcgtggagaccgagcggctgatcggcttcttcgtcaacacccaggtgctcaaggccgacctggacggtcggatgggcttcgacgagctgctggcccaggcccgccaacgcgcgctggaggcccaggcgcaccaggacctgccgttcgagcaactggtggaagccttgcagccggagcgcaatgccagccacaacccactgttccaggtgctgttcaaccatcagagcgagatacgctcggtgacgcccgaggttcagttggaggacctgcgtctggaaggcctggcctgggacggccagactgcgcagttcgacctgacgctggatattcaggaagacgaaaacggcatctgggcctccttcgactatgccaccgatctgttcgacgcctccaccgtggaacgcctggccggccattggcgcaacctgttgcgcggcatcgtcgccaacccacgacagcggctcggcgagttgccgctgctggatggtgccgagtcccgacggatgctcgtcgagtggaacgacacgcgggaagcgtacgccgccgaccggcgcgtccacgaactattcgaggctcaggcggcgcggacgccggacgcgtcggcggtcgagtcgcaagggcgcgcgctgagttatgccgagctgaatagacgggccaatcaactggcccgccatctgcgacgcatgggcgtcgggccggaagtgctggtcggcatctgcgtcgagaagagcgtcgagatgctggtcgggcttttgggcatactcaaagccgggggggcgtatgtcccgctcgacccggcgttcccggccgagcggctcgccttcatggcggaagacgcggaactgcccgtcctgctgaccgaatcaagactgacggcagtcgtccccccgaaccccacgcgccgtaccgtccttctcgattcggattgggaactcatcgcgggcgagagtggggacgacctgtccgacaccggcggcggcgagaatacggcttacgtgatctacacctcgggctcgaccggcagaccgaagggcgtacaggtttcacaccgcgcgttggttaatttcctgcactcgatgcgcgggcggcccgggatcgaagcaggcgacacgctgctcgccgtcaccaccctctccttcgacatcgccgggctggagctttacctgccgctcttgacgggcgcgcgcgtcgtcgtcgccggccgggaagaactctcagacggagccttgttgtcggagaggataagccgctcgggcgcgaccgtgatgcaggcgaccccggccacctggcgtctgctgctcggggcgggatggcggggcaagagcgatctgcgcatcttctgcggcggcgaggcgctcgcgcgcgaactggcgaatcagttgttggaaaagtgcgccgagctttggaacctctacggcccgacggagacgaccatctggtcggcgattcatcgagtcgagacgacggaaggggccgtgtccgtcggtcgcccgatagccaacacgcgggtctacgtgctcgacaagaatctgcgccccgtgcccgccggagtcccgggcgaactgctcatcggcggcgacggattagcccgggggtatctgaatcgccccgacctgacggccgagaagttcgtgcccgacccgttcggcgatgcccccggcgcgcggctctaccgcacgggcgacctcgcgcgttactcgcccggcggagagcttgagattcttaaccgtatcgaccaccaggtgaaggttcgcggcttccgtatcgaactgggtgagatcgaagcggcgctcgccggtctggccggggtacgcgatgccgtggtgctggcccatgacggggtcggcggcacgcaactggtgggatacgtggtggcggactcggcggaggatgccgagcgtctgcgggagtcgctgcgggagtcgctgaagcggcacctgccggactacatggtgccggcgcacctgatgctgctggagcggatgccgctgacggtcaatggcaagctcgaccggcaggcgttgccgcaaccggatgcggccgc

SEQ ID NO: 226 - protein, 970 aa, Artificial Sequence
  Description of Artificial Sequence: Synthetic polypeptide
SRTTDAVSTIPLADRQQPLALSFAQERQWFLWQLEPESAAYHIPSALRLRGRLDVDALQRSFDSLVARHETLRTRFRLEGGRSYQQVQPAVSVSIEREQFGEEGLIERIQAIVVQPFDLERGPLLRVNLLQLAEDDHVLVLVQHHIVSDGWSMQVMVEELVQLYAAYSQGLDVVLPALPIQYADYALWQRSWMEAGEKERQLAYWTGLLGGEQPVLELPFDRPRPARQSHRGAQLGFELSRELVEAVRALAQREGASSFMLLLASFQALLYRYSGQADIRVGVPIANRNRVETERLIGFFVNTQVLKADLDGRMGFDELLAQARQRALEAQAHQDLPFEQLVEALQPERNASHNPLFQVLFNHQSEIRSVTPEVQLEDLRLEGLAWDGQTAQFDLTLDIQEDENGIWASFDYATDLFDASTVERLAGHWRNLLRGIVANPRQRLGELPLLDGAESRRMLVEWNDTREAYAADRRVHELFEAQAARTPDASAVESQGRALSYAELNRRANQLARHLRRMGVGPEVLVGICVEKSVEMLVGLLGILKAGGAYVPLDPAFPAERLAFMAEDAELPVLLTESRLTAVVPPNPTRRTVLLDSDWELIAGESGDDLSDTGGGENTAYVIYTSGSTGRPKGVQVSHRALVNFLHSMRGRPGIEAGDTLLAVTTLSFDIAGLELYLPLLTGARVVVAGREELSDGALLSERISRSGATVMQATPATWRLLLGAGWRGKSDLRIFCGGEALARELANQLLEKCAELWNLYGPTETTIWSAIHRVETTEGAVSVGRPIANTRVYVLDKNLRPVPAGVPGELLIGGDGLARGYLNRPDLTAEKFVPDPFGDAPGARLYRTGDLARYSPGGELEILNRIDHQVKVRGFRIELGEIEAALAGLAGVRDAVVLAHDGVGGTQLVGYVVADSAEDAERLRESLRESLKRHLPDYMVPAHLMLLERMPLTVNGKLDRQALPQPDAA

SEQ ID NO: 227 - DNA, 2912 bp, Artificial Sequence
  Description of Artificial Sequence: Synthetic polynucleotide
tctagaacgacggatgcggtctcgacgataccgcttgccgatcggcagcaaccgttggcactgtccttcgctcaggagcgtcagtggttcctctggcaactggagccggaaagcgcggcctaccatattccgagtgccttgcgcctacgcgggcggctggacgtggatgccttgcaacgcagcttcgacagcctggtcgcgcggcatgaaaccttgcgtacccgcttccggctggagggagggcgttcgtaccagcaggtacaacctgcggttagcgtttccatcgagcgggaacagttcggtgaagaaggcctgatcgaacggatacaggccatcgttgtgcagccattcgacctggaacgggggccgctgctgcgggtgaacctgttgcaactggccgaggacgaccatgtactggtgctggtccagcaccacatcgtgtccgatggttggtcgatgcaggtgatggtcgaggaactggtccagctctatgccgcctatagccaagggctcgacgtggtgttgccagccctgccgatccagtacgcggactacgccctgtggcagcgcagctggatggaggcgggggaaaaggagcgccagttggcgtactggaccggcctgctgggcggcgagcagccggtgctggagttgccgttcgatcggccgcgtccggcccggcagagccatcgtggcgcgcagttgggtttcgagctatcgcgggaactggtcgaggccgtgagagccttggcccagcgtgaaggcgccagtagtttcatgctgttgctggcctcgttccaggcgctgttgtatcgctacagcgggcaggcggatatccgtgtcggtgtgccgatcgccaatcgcaaccgcgtggagaccgagcggctgatcggcttcttcgtcaacacccaggtgctcaaggccgacctggacggtcggatgggcttcgacgagctgctggcccaggcccgccaacgcgcgctggaggcccaggcgcaccaggacctgccgttcgagcaactggtggaagccttgcagccggagcgcaatgccagccacaacccactgttccaggtgctgttcaaccatcagagcgagatacgctcggtgacgcccgaggttcagttggaggacctgcgtctggaaggcctggcctgggacggccagactgcgcagttcgacctgacgctggatattcaggaagacgaaaacggcatctgggcctccttcgactatgccaccgatctgttcgacgcctccaccgtggaacgcctggccggccattggcgcaacctgttgcgcggcatcgtcgccaacccacgacagcggctcggcgagttgccgctgctggatggtgccgagtcccgacggatgctcgtcgagtggaacgacacgcgggaagcgtacgccgccgaccggcgcgtccacgaactattcgaggctcaggcggcgcggacgccggacgcgtcggcggtcgagtcgcaagggcgcgcgctgagttatgccgagctgaatagacgggccaatcaactggcccgccatctgcgacgcatgggcgtcgggccggaagtgctggtcggcatctgcgtcgagaagagcgtcgagatgctggtcgggcttttgggcatactcaaagccgggggggcgtatgtcccgctcgacccggcgttcccggccgagcggctcgccttcatggcggaagacgcggaactgcccgtcctgctgaccgaatcaagactgacggcagtcgtccccccgaaccccacgcgccgtaccgtccttctcgattcggattgggaactcatcgcgggcgagagtggggacgacctgtccgacaccggcggcggcgagaatacggcttacgtgatctacacctcgggctcgaccggcagaccgaagggcgtacaggtttcacaccgcgcgttggttaatttcctgcactcgatgcgcgggcggcccgggatcgaagcaggcgacacgctgctcgccgtcaccaccctctccttcgacatcgccgggctggagctttacctgccgctcttgacgggcgcgcgcgtcgtcgtcgccggccgggaagaactctcagacggagccttgttgtcggagaggataagccgctcgggcgcgaccgtgatgcaggcgaccccggccacctggcgtctgctgctcggggcgggatggcggggcaagagcgatctgcgcatcttctgcggcggcgaggcgctcgcgcgcgaactggcgaatcagttgttggaaaagtgcgccgagctttggaacctctacggcccgacggagacgaccatctggtcggcgattcatcgagtcgagacgacggaaggggccgtgtccgtcggtcgcccgatagccaacacgcgggtctacgtgctcgacaagaatctgcgccccgtgcccgccggagtcccgggcgaactgctcatcggcggcgacggattagcccgggggtatctgaatcgccccgacctgacggccgagaagttcgtgcccgacccgttcggcgatgcccccggcgcgcggctctaccgcacgggcgacctcgcgcgttactcgcccggcggagagcttgagattcttaaccgcgttgacacgcaggtgaaggttcgcggcttccgtatcgaactgggtgagatcgaagcggcgctcgccggtctggccggggtacgcgatgccgtggtgctggcccatgacggggtcggcggcacgcaactggtgggatacgtggtggcggactcggcggaggatgccgagcgtctgcgggagtcgctgcgggagtcgctgaagcggcacctgccggactacatggtgccggcgcacctgatgctgctggagcggatgccgctgacggtcaatggcaagctcgaccggcaggcgttgccgcaaccggatgcggccgc

SEQ ID NO: 228 - protein, 970 aa, Artificial Sequence
  Description of Artificial Sequence: Synthetic polypeptide
SRTTDAVSTIPLADRQQPLALSFAQERQWFLWQLEPESAAYHIPSALRLRGRLDVDALQRSFDSLVARHETLRTRFRLEGGRSYQQVQPAVSVSIEREQFGEEGLIERIQAIVVQPFDLERGPLLRVNLLQLAEDDHVLVLVQHHIVSDGWSMQVMVEELVQLYAAYSQGLDVVLPALPIQYADYALWQRSWMEAGEKERQLAYWTGLLGGEQPVLELPFDRPRPARQSHRGAQLGFELSRELVEAVRALAQREGASSFMLLLASFQALLYRYSGQADIRVGVPIANRNRVETERLIGFFVNTQVLKADLDGRMGFDELLAQARQRALEAQAHQDLPFEQLVEALQPERNASHNPLFQVLFNHQSEIRSVTPEVQLEDLRLEGLAWDGQTAQFDLTLDIQEDENGIWASFDYATDLFDASTVERLAGHWRNLLRGIVANPRQRLGELPLLDGAESRRMLVEWNDTREAYAADRRVHELFEAQAARTPDASAVESQGRALSYAELNRRANQLARHLRRMGVGPEVLVGICVEKSVEMLVGLLGILKAGGAYVPLDPAFPAERLAFMAEDAELPVLLTESRLTAVVPPNPTRRTVLLDSDWELIAGESGDDLSDTGGGENTAYVIYTSGSTGRPKGVQVSHRALVNFLHSMRGRPGIEAGDTLLAVTTLSFDIAGLELYLPLLTGARVVVAGREELSDGALLSERISRSGATVMQATPATWRLLLGAGWRGKSDLRIFCGGEALARELANQLLEKCAELWNLYGPTETTIWSAIHRVETTEGAVSVGRPIANTRVYVLDKNLRPVPAGVPGELLIGGDGLARGYLNRPDLTAEKFVPDPFGDAPGARLYRTGDLARYSPGGELEILNRVDTQVKVRGFRIELGEIEAALAGLAGVRDAVVLAHDGVGGTQLVGYVVADSAEDAERLRESLRESLKRHLPDYMVPAHLMLLERMPLTVNGKLDRQALPQPDAA

SEQ ID NO: 229 - DNA, 2912 bp, Artificial Sequence
  Description of Artificial Sequence: Synthetic polynucleotide
tctagaacgacggatgcggtctcgacgataccgcttgccgatcggcagcaaccgttggcactgtccttcgctcaggagcgtcagtggttcctctggcaactggagccggaaagcgcggcctaccatattccgagtgccttgcgcctacgcgggcggctggacgtggatgccttgcaacgcagcttcgacagcctggtcgcgcggcatgaaaccttgcgtacccgcttccggctggagggagggcgttcgtaccagcaggtacaacctgcggttagcgtttccatcgagcgggaacagttcggtgaagaaggcctgatcgaacggatacaggccatcgttgtgcagccattcgacctggaacgggggccgctgctgcgggtgaacctgttgcaactggccgaggacgaccatgtactggtgctggtccagcaccacatcgtgtccgatggttggtcgatgcaggtgatggtcgaggaactggtccagctctatgccgcctatagccaagggctcgacgtggtgttgccagccctgccgatccagtacgcggactacgccctgtggcagcgcagctggatggaggcgggggaaaaggagcgccagttggcgtactggaccggcctgctgggcggcgagcagccggtgctggagttgccgttcgatcggccgcgtccggcccggcagagccatcgtggcgcgcagttgggtttcgagctatcgcgggaactggtcgaggccgtgagagccttggcccagcgtgaaggcgccagtagtttcatgctgttgctggcctcgttccaggcgctgttgtatcgctacagcgggcaggcggatatccgtgtcggtgtgccgatcgccaatcgcaaccgcgtggagaccgagcggctgatcggcttcttcgtcaacacccaggtgctcaaggccgacctggacggtcggatgggcttcgacgagctgctggcccaggcccgccaacgcgcgctggaggcccaggcgcaccaggacctgccgttcgagcaactggtggaagccttgcagccggagcgcaatgccagccacaacccactgttccaggtgctgttcaaccatcagagcgagatacgctcggtgacgcccgaggttcagttggaggacctgcgtctggaaggcctggcctgggacggccagactgcgcagttcgacctgacgctggatattcaggaagacgaaaacggcatctgggcctccttcgactatgccaccgatctgttcgacgcctccaccgtggaacgcctggccggccattggcgcaacctgttgcgcggcatcgtcgccaacccacgacagcggctcggcgagttgccgctgctggatggtgccgagtcccgacggatgctcgtcgagtggaacgacacgcgggaagcgtacgccgccgaccggcgcgtccacgaactattcgaggctcaggcggcgcggacgccggacgcgtcggcggtcgagtcgcaagggcgcgcgctgagttatgccgagctgaatagacgggccaatcaactggcccgccatctgcgacgcatgggcgtcgggccggaagtgctggtcggcatctgcgtcgagaagagcgtcgagatgctggtcgggcttttgggcatactcaaagccgggggggcgtatgtcccgctcgacccggcgttcccggccgagcggctcgccttcatggcggaagacgcggaactgcccgtcctgctgaccgaatcaagactgacggcagtcgtccccccgaaccccacgcgccgtaccgtccttctcgattcggattgggaactcatcgcgggcgagagtggggacgacctgtccgacaccggcggcggcgagaatacggcttacgtgatctacacctcgggctcgaccggcagaccgaagggcgtacaggtttcacaccgcgcgttggttaatttcctgcactcgatgcgcgggcggcccgggatcgaagcaggcgacacgctgctcgccgtcaccaccctctccttcgacatcgccgggctggagctttacctgccgctcttgacgggcgcgcgcgtcgtcgtcgccggccgggaagaactctcagacggagccttgttgtcggagaggataagccgctcgggcgcgaccgtgatgcaggcgaccccggccacctggcgtctgctgctcggggcgggatggcggggcaagagcgatctgcgcatcttctgcggcggcgaggcgctcgcgcgcgaactggcgaatcagttgttggaaaagtgcgccgagctttggaacctctacggcccgacggagacgaccatctggtcggcgattcatcgagtcgagacgacggaaggggccgtgtccgtcggtcgcccgatagccaacacgcgggtctacgtgctcgacaagaatctgcgccccgtgcccgccggagtcccgggcgaactgctcatcggcggcgacggattagcccgggggtatctgaatcgccccgacctgacggccgagaagttcgtgcccgacccgttcggcgatgcccccggcgcgcggctctaccgcacgggcgacctcgcgcgttactcgcccggcggagagcttgagattcttaaccgcgttgacacgcaggtgaagattcgcggcttccgcatcgagccgggtgagatcgaggcggcgctcgccggtctggccggggtacgcgatgccgtggtgctggcccatgacggggtcggcggcacgcaactggtgggatacgtggtggcggactcggcggaggatgccgagcgtctgcgggagtcgctgcgggagtcgctgaagcggcacctgccggactacatggtgccggcgcacctgatgctgctggagcggatgccgctgacggtcaatggcaagctcgaccggcaggcgttgccgcaaccggatgcggccgc

SEQ ID NO: 230 - protein, 970 aa, Artificial Sequence
  Description of Artificial Sequence: Synthetic polypeptide
SRTTDAVSTIPLADRQQPLALSFAQERQWFLWQLEPESAAYHIPSALRLRGRLDVDALQRSFDSLVARHETLRTRFRLEGGRSYQQVQPAVSVSIEREQFGEEGLIERIQAIVVQPFDLERGPLLRVNLLQLAEDDHVLVLVQHHIVSDGWSMQVMVEELVQLYAAYSQGLDVVLPALPIQYADYALWQRSWMEAGEKERQLAYWTGLLGGEQPVLELPFDRPRPARQSHRGAQLGFELSRELVEAVRALAQREGASSFMLLLASFQALLYRYSGQADIRVGVPIANRNRVETERLIGFFVNTQVLKADLDGRMGFDELLAQARQRALEAQAHQDLPFEQLVEALQPERNASHNPLFQVLFNHQSEIRSVTPEVQLEDLRLEGLAWDGQTAQFDLTLDIQEDENGIWASFDYATDLFDASTVERLAGHWRNLLRGIVANPRQRLGELPLLDGAESRRMLVEWNDTREAYAADRRVHELFEAQAARTPDASAVESQGRALSYAELNRRANQLARHLRRMGVGPEVLVGICVEKSVEMLVGLLGILKAGGAYVPLDPAFPAERLAFMAEDAELPVLLTESRLTAVVPPNPTRRTVLLDSDWELIAGESGDDLSDTGGGENTAYVIYTSGSTGRPKGVQVSHRALVNFLHSMRGRPGIEAGDTLLAVTTLSFDIAGLELYLPLLTGARVVVAGREELSDGALLSERISRSGATVMQATPATWRLLLGAGWRGKSDLRIFCGGEALARELANQLLEKCAELWNLYGPTETTIWSAIHRVETTEGAVSVGRPIANTRVYVLDKNLRPVPAGVPGELLIGGDGLARGYLNRPDLTAEKFVPDPFGDAPGARLYRTGDLARYSPGGELEILNRVDTQVKIRGFRIEPGEIEAALAGLAGVRDAVVLAHDGVGGTQLVGYVVADSAEDAERLRESLRESLKRHLPDYMVPAHLMLLERMPLTVNGKLDRQALPQPDAA

SEQ ID NO: 231 - DNA, 2257 bp, Artificial Sequence
  Description of Artificial Sequence: Synthetic polynucleotide
aagcttatgagcagaaaaccactctgccaaaaaaagaagccgccttcgcaaaagcgtttcagccgacccagtaccgtttctcgctgaaccgtaccctgactaaacagctgggcactatcgcgagccagaaccaggtgaccctgtctactgttattcagaccatctggggtgtgctgctgcagaaatataacgcggcccatgatgttctgtttggttctgtcgtgtccggtcgtccaaccgatattgtaggcatcgataaaatggttggtctgttcattaacactatcccgttccgtgtccaggctaaagcgggccagactttttcagaactgctgcaggccgtacacaaacgtaccctgcagtcccagccgtatgaacacgtaccgctgtatgatattcagactcagtctgttttaaagcaggaactgattgatcacctgctggtaattgaaaactacccgctggtggaggcactgcagaaaaaagcgctgaaccagcagatcggcttcaccattactgccgtagaaatgtttgaaccgaccaactacgatctgaccgttatggttatgccgaaagaagaacttgcattccgttttgattataacgcagccctgttcgacgaacaggtggttcagaaactagcgggccacctgcagcagatcgcagactgcgttgcgaacaactccggtgtggaactgtgtcaaattccgctgctgaccgaagagggtagcctgctgctgcacgatttcaaccgtaccgaagcggaatacccgaaagaccagactatcaacgcgctgttcgaagaacgtgcggaacagcgcgcagatcacccggccctggtgtggggggaacaaaccctgacctaccgtgaactcaatgaacaggctaaccgcctggctaaagtcctgcgcgcccgtggggtgaaagccgatgatatcgttgcgatcatgaccgaacgtagtatggaaatggttatcggaattctgggtactctgaaggcgggcggtgcttacctgccgattgatccgaactacccggaagaacgtatccactatatgctggaggactctggcgcgtcgatgctgctgactcaaaaacacctccgcgacaaactgacctatcacggtcctattatggatgttgatggtgaagacctgaaacacctggaactggacggccatgcgaacctgcagccggctaacaaaccagaagacctggcatacattatttatacctcgggcagcaccggcaaaccgaaaggcgttatggttgaacaccgcggcatcatcaacctgtggcatttttttcaggagcagtggggtgttaacggctcggaccgtatgctgcagttcgccagctcctccttcgacgcctctgtgtgggagatgttcactatcctgcttggcggtggtaccctgtacctggtttctcgcgacattatcaacaacctgaacgagttcgcgcgtttcgtaaacgagaaccagatcacaatcgctctgctgccgcctacctatctggcgggtattgaaccggagaaactgccggctctgaaaaaactggttaccggtgggtctgcgatcacaaaagagctggttactcgttggaaagactccgtagaatatatgaacgcctacggtccgtccgaatcgtctgtcatcgccaccgcatggacctaccgtgaagaagacatggggtatagcagcgtaccgatcggcaaaccgattgcaaacacccgtatttacatcatggacgaacatcagaagctgctgccgttaggtgcggcaggtgaaatgtgtgtggctggcgacggtctggcgcgcggttacctgcaccgcccagaactgaccgccgagaaattcgtggttaacccatatgaagcaggtgaaaaactttaccgtaccggcgatctggttcgttggttgcctgacggtaacattgaattcctgggccgtatcgacgaccaagtgaaaatccgtggtttccgtatcgagctgggtgaaatcgaagcacagctgcagaagcacccgcttgtgcaggaagtagcggttatcgcccgtgaagataagcagaaagaaaagtacctcgcggcgtatattaccgcggaaggtgaaccggaggctgaagagctgcgcgaacagcttctccaggaactgcccgattatatggtaccttccagtttcatgcagctcgagcacatgccgatgactccgtccggcaagattgatcgtaaagcactgccagagccggaagcggccgc

SEQ ID NO: 232 - protein, 751 aa, Artificial Sequence
  Description of Artificial Sequence: Synthetic polypeptide
AYEQKTTLPKKEAAFAKAFQPTQYRFSLNRTLTKQLGTIASQNQVTLSTVIQTIWGVLLQKYNAAHDVLFGSVVSGRPTDIVGIDKMVGLFINTIPFRVQAKAGQTFSELLQAVHKRTLQSQPYEHVPLYDIQTQSVLKQELIDHLLVIENYPLVEALQKKALNQQIGFTITAVEMFEPTNYDLTVMVMPKEELAFRFDYNAALFDEQVVQKLAGHLQQIADCVANNSGVELCQIPLLTEEGSLLLHDFNRTEAEYPKDQTINALFEERAEQRADHPALVWGEQTLTYRELNEQANRLAKVLRARGVKADDIVAIMTERSMEMVIGILGTLKAGGAYLPIDPNYPEERIHYMLEDSGASMLLTQKHLRDKLTYHGPIMDVDGEDLKHLELDGHANLQPANKPEDLAYIIYTSGSTGKPKGVMVEHRGIINLWHFFQEQWGVNGSDRMLQFASSSFDASVWEMFTILLGGGTLYLVSRDIINNLNEFARFVNENQITIALLPPTYLAGIEPEKLPALKKLVTGGSAITKELVTRWKDSVEYMNAYGPSESSVIATAWTYREEDMGYSSVPIGKPIANTRIYIMDEHQKLLPLGAAGEMCVAGDGLARGYLHRPELTAEKFVVNPYEAGEKLYRTGDLVRWLPDGNIEFLGRIDDQVKIRGFRIELGEIEAQLQKHPLVQEVAVIAREDKQKEKYLAAYITAEGEPEAEELREQLLQELPDYMVPSSFMQLEHMPMTPSGKIDRKALPEPEAA

SEQ ID NO: 233 - DNA, 2260 bp, Artificial Sequence
  Description of Artificial Sequence: Synthetic polynucleotide
aagcttatgagcagaaaaccactctgccaaaaaaagaagccgccttcgcaaaagcgtttcagccgacccagtaccgtttctcgctgaaccgtaccctgactaaacagctgggcactatcgcgagccagaaccaggtgaccctgtctactgttattcagaccatctggggtgtgctgctgcagaaatataacgcggcccatgatgttctgtttggttctgtcgtgtccggtcgtccaaccgatattgtaggcatcgataaaatggttggtctgttcattaacactatcccgttccgtgtccaggctaaagcgggccagactttttcagaactgctgcaggccgtacacaaacgtaccctgcagtcccagccgtatgaacacgtaccgctgtatgatattcagactcagtctgttttaaagcaggaactgattgatcacctgctggtaattgaaaactacccgctggtggaggcactgcagaaaaaagcgctgaaccagcagatcggcttcaccattactgccgtagaaatgtttgaaccgaccaactacgatctgaccgttatggttatgccgaaagaagaacttgcattccgttttgattataacgcagccctgttcgacgaacaggtggttcagaaactagcgggccacctgcagcagatcgcagactgcgttgcgaacaactccggtgtggaactgtgtcaaattccgctgctgaccgaagcggaaaccagccagctgcttgcaaaattcaaccgtaccgaagcggaatacccgaaagaccagactatcaacgcgctgttcgaagaacgtgcggaacagcgcgcagatcacccggccctggtgtggggggaacaaaccctgacctaccgtgaactcaatgaacaggctaaccgcctggctaaagtcctgcgcgcccgtggggtgaaagccgatgatatcgttgcgatcatgaccgaacgtagtatggaaatggttatcggaattctgggtactctgaaggcgggcggtgcttacctgccgattgatccgaactacccggaagaacgtatccactatatgctggaggactctggcgcgtcgatgctgctgactcaaaaacacctccgcgacaaactgacctatcacggtcctattatggatgttgatggtgaagacctgaaacacctggaactggacggccatgcgaacctgcagccggctaacaaaccagaagacctggcatacattatttatacctcgggcagcaccggcaaaccgaaaggcgttatggttgaacaccgcggcatcatcaacctgtggcatttttttcaggagcagtggggtgttaacggctcggaccgtatgctgcagttcgccagctcctccttcgacgcctctgtgtgggagatgttcactatcctgcttggcggtggtaccctgtacctggtttctcgcgacattatcaacaacctgaacgagttcgcgcgtttcgtaaacgagaaccagatcacaatcgctctgctgccgcctacctatctggcgggtattgaaccggagaaactgccggctctgaaaaaactggttaccggtgggtctgcgatcacaaaagagctggttactcgttggaaagactccgtagaatatatgaacgcctacggtccgtccgaatcgtctgtcatcgccaccgcatggacctaccgtgaagaagacatggggtatagcagcgtaccgatcggcaaaccgattgcaaacacccgtatttacatcatggacgaacatcagaagctgctgccgttaggtgcggcaggtgaaatgtgtgtggctggcgacggtctggcgcgcggttacctgcaccgcccagaactgaccgccgagaaattcgtggttaacccatatgaagcaggtgaaaaactttaccgtaccggcgatctggttcgttggttgcctgacggtaacattgaattcctgggccgtatcgacgaccaagtgaaaatccgtggtttccgtatcgagctgggtgaaatcgaagcacagctgcagaagcacccgcttgtgcaggaagtagcggttatcgcccgtgaagataagcagaaagaaaagtacctcgcggcgtatattaccgcggaaggtgaaccggaggctgaagagctgcgcgaacagcttctccaggaactgcccgattatatggtaccttccagtttcatgcagctcgagcacatgccgatgactccgtccggcaagattgatcgtaaagcactgccagagccggaagcggccgc

SEQ ID NO: 234 - protein, 752 aa, Artificial Sequence
  Description of Artificial Sequence: Synthetic polypeptide
AYEQKTTLPKKEAAFAKAFQPTQYRFSLNRTLTKQLGTIASQNQVTLSTVIQTIWGVLLQKYNAAHDVLFGSVVSGRPTDIVGIDKMVGLFINTIPFRVQAKAGQTFSELLQAVHKRTLQSQPYEHVPLYDIQTQSVLKQELIDHLLVIENYPLVEALQKKALNQQIGFTITAVEMFEPTNYDLTVMVMPKEELAFRFDYNAALFDEQVVQKLAGHLQQIADCVANNSGVELCQIPLLTEAETSQLLAKFNRTEAEYPKDQTINALFEERAEQRADHPALVWGEQTLTYRELNEQANRLAKVLRARGVKADDIVAIMTERSMEMVIGILGTLKAGGAYLPIDPNYPEERIHYMLEDSGASMLLTQKHLRDKLTYHGPIMDVDGEDLKHLELDGHANLQPANKPEDLAYIIYTSGSTGKPKGVMVEHRGIINLWHFFQEQWGVNGSDRMLQFASSSFDASVWEMFTILLGGGTLYLVSRDIINNLNEFARFVNENQITIALLPPTYLAGIEPEKLPALKKLVTGGSAITKELVTRWKDSVEYMNAYGPSESSVIATAWTYREEDMGYSSVPIGKPIANTRIYIMDEHQKLLPLGAAGEMCVAGDGLARGYLHRPELTAEKFVVNPYEAGEKLYRTGDLVRWLPDGNIEFLGRIDDQVKIRGFRIELGEIEAQLQKHPLVQEVAVIAREDKQKEKYLAAYITAEGEPEAEELREQLLQELPDYMVPSSFMQLEHMPMTPSGKIDRKALPEPEAA

SEQ ID NO: 235 - DNA, 2278 bp, Artificial Sequence
  Description of Artificial Sequence: Synthetic polynucleotide
aagcttatgagcagaaaaccactctgccaaaaaaagaagccgccttcgcaaaagcgtttcagccgacccagtaccgtttctcgctgaaccgtaccctgactaaacagctgggcactatcgcgagccagaaccaggtgaccctgtctactgttattcagaccatctggggtgtgctgctgcagaaatataacgcggcccatgatgttctgtttggttctgtcgtgtccggtcgtccaaccgatattgtaggcatcgataaaatggttggtctgttcattaacactatcccgttccgtgtccaggctaaagcgggccagactttttcagaactgctgcaggccgtacacaaacgtaccctgcagtcccagccgtatgaacacgtaccgctgtatgatattcagactcagtctgttttaaagcaggaactgattgatcacctgctggtaattgaaaactacccgctggtggaggcactgcagaaaaaagcgctgaaccagcagatcggcttcaccattactgccgtagaaatgtttgaaccgaccaactacgatctgaccgttatggttatgccgaaagaagaacttgcattccgttttgattataacgcagccctgttcgacgaacaggtggttcagaaactagcgggccacctgcagcagatcgcagactgcgttgcgaacaactccggtgtggaactgtgtcaaattccgctgctgaccccggaagaaaaacagcaaatcctggccggcttcaacgacaccgctgtctcttacgcgctggacaaaacactgcaccagctgttcgaagagcaggttgacaaaaccccggaccaggcggctctgctgttctccgaacaaagcctgacctactctgaactgaacgagcgcgcaaaccgtctggctcgcgtgctgcgtgccaaaggtgtaggtccagaccgcctcgttgctattatggcagagcgttccccggagatggttatcggtatcctcggcatcctgaaagcaggtggcgcgtacgttccggtggacccgggctacccgcaagaacgtatccagtacctgctggaagactcgaacgctgcgctgctgctgtctcaggctcacctgctgccactgctggcgcaggttagtagcgaactgcctgaatgcctggacctgaatgctgaactggatgctggtctgagcggttctaacctgccggcagttaaccaaccgaccgatctggcgtacgttatctatacgtcaggcaccaccggcaagcctaaaggcgttatgatcccgcaccagggcatcgtcaactgcctgcagtggcgccgtgatgaatacggcttcggcccgtctgataaagctttgcaggttttctccttcgcgtttgacggtttcgtggcgtctctgttcgcaccgcttttaggcggtgcgacctgcgtcctccctcaggaagctgcggcaaaagacccggttgcccttaaaaagcttatggcggctaccgaagtgacgcattactacggcgtaccgtcattattccaggcaatcctggattgtagcacgactactgatttcaatcaactgcgttgcgtaaccttgggcggtgaaaaattgccggttcagctggttcagaaaaccaaagaaaaacatccggcgattgaaattaacaatgaatatggtccgaccgaaaactccgtggtaaccaccatcagccgttctatcgaagcaggccaggcaatcacaatcggccgtccgctggcgaacgttcaggtgtacatcgttgacgagcagcaccacctgcaaccgatcggtgttgtgggcgagctgtgtatcggcggcgcgggcctggcgcgtggttacctgaacaaaccagagctgactgcggagaagttcgttgccaacccgttccgtccaggcgaacgtatgtacaaaactggtgacctggttaagtggcgtaccgatggcaccatcgaatatatcggccgcgcggacgaacaggtaaaagtccgtggttatcgtatcgaaatcggtgaaatcgaatctgccgttctggcataccaaggtatcgatcaagcggttgtggtggctcgtgatgatgatgcaaccgcaggttcgtacctgtgtgcttacttcgttgctgcaaccgcggttagcgtttccggtctgcgttctcatctggccaaagaactgccggcttatatgattccgagctactttgtggaactggatcagctgcctctgtccgcgaacggtaaagttgatcgtaaagcactgccgaaaccgcaggcggccgc

SEQ ID NO: 236 - protein, 758 aa, Artificial Sequence
  Description of Artificial Sequence: Synthetic polypeptide
AYEQKTTLPKKEAAFAKAFQPTQYRFSLNRTLTKQLGTIASQNQVTLSTVIQTIWGVLLQKYNAAHDVLFGSVVSGRPTDIVGIDKMVGLFINTIPFRVQAKAGQTFSELLQAVHKRTLQSQPYEHVPLYDIQTQSVLKQELIDHLLVIENYPLVEALQKKALNQQIGFTITAVEMFEPTNYDLTVMVMPKEELAFRFDYNAALFDEQVVQKLAGHLQQIADCVANNSGVELCQIPLLTPEEKQQILAGFNDTAVSYALDKTLHQLFEEQVDKTPDQAALLFSEQSLTYSELNERANRLARVLRAKGVGPDRLVAIMAERSPEMVIGILGILKAGGAYVPVDPGYPQERIQYLLEDSNAALLLSQAHLLPLLAQVSSELPECLDLNAELDAGLSGSNLPAVNQPTDLAYVIYTSGTTGKPKGVMIPHQGIVNCLQWRRDEYGFGPSDKALQVFSFAFDGFVASLFAPLLGGATCVLPQEAAAKDPVALKKLMAATEVTHYYGVPSLFQAILDCSTTTDFNQLRCVTLGGEKLPVQLVQKTKEKHPAIEINNEYGPTENSVVTTISRSIEAGQAITIGRPLANVQVYIVDEQHHLQPIGVVGELCIGGAGLARGYLNKPELTAEKFVANPFRPGERMYKTGDLVKWRTDGTIEYIGRADEQVKVRGYRIEIGEIESAVLAYQGIDQAVVVARDDDATAGSYLCAYFVAATAVSVSGLRSHLAKELPAYMIPSYFVELDQLPLSANGKVDRKALPKPQAA

SEQ ID NO: 237 - DNA, 2278 bp, Artificial Sequence
  Description of Artificial Sequence: Synthetic polynucleotide
aagcttatgagcagaaaaccactctgccaaaaaaagaagccgccttcgcaaaagcgtttcagccgacccagtaccgtttctcgctgaaccgtaccctgactaaacagctgggcactatcgcgagccagaaccaggtgaccctgtctactgttattcagaccatctggggtgtgctgctgcagaaatataacgcggcccatgatgttctgtttggttctgtcgtgtccggtcgtccaaccgatattgtaggcatcgataaaatggttggtctgttcattaacactatcccgttccgtgtccaggctaaagcgggccagactttttcagaactgctgcaggccgtacacaaacgtaccctgcagtcccagccgtatgaacacgtaccgctgtatgatattcagactcagtctgttttaaagcaggaactgattgatcacctgctggtaattgaaaactacccgctggtggaggcactgcagaaaaaagcgctgaaccagcagatcggcttcaccattactgccgtagaaatgtttgaaccgaccaactacgatctgaccgttatggttatgccgaaagaagaacttgcattccgttttgattataacgcagccctgttcgacgaacaggtggttcagaaactagcgggccacctgcagcagatcgcagactgcgttgcgaacaactccggtgtggaactgtgtcaaattccgctgctgaccgaagcggaaaccagccagctgcttgcaaaattcaacgacaccgctgtctcttacgcgctggacaaaacactgcaccagctgttcgaagagcaggttgacaaaaccccggaccaggcggctctgctgttctccgaacaaagcctgacctactctgaactgaacgagcgcgcaaaccgtctggctcgcgtgctgcgtgccaaaggtgtaggtccagaccgcctcgttgctattatggcagagcgttccccggagatggttatcggtatcctcggcatcctgaaagcaggtggcgcgtacgttccggtggacccgggctacccgcaagaacgtatccagtacctgctggaagactcgaacgctgcgctgctgctgtctcaggctcacctgctgccactgctggcgcaggttagtagcgaactgcctgaatgcctggacctgaatgctgaactggatgctggtctgagcggttctaacctgccggcagttaaccaaccgaccgatctggcgtacgttatctatacgtcaggcaccaccggcaagcctaaaggcgttatgatcccgcaccagggcatcgtcaactgcctgcagtggcgccgtgatgaatacggcttcggcccgtctgataaagctttgcaggttttctccttcgcgtttgacggtttcgtggcgtctctgttcgcaccgcttttaggcggtgcgacctgcgtcctccctcaggaagctgcggcaaaagacccggttgcccttaaaaagcttatggcggctaccgaagtgacgcattactacggcgtaccgtcattattccaggcaatcctggattgtagcacgactactgatttcaatcaactgcgttgcgtaaccttgggcggtgaaaaattgccggttcagctggttcagaaaaccaaagaaaaacatccggcgattgaaattaacaatgaatatggtccgaccgaaaactccgtggtaaccaccatcagccgttctatcgaagcaggccaggcaatcacaatcggccgtccgctggcgaacgttcaggtgtacatcgttgacgagcagcaccacctgcaaccgatcggtgttgtgggcgagctgtgtatcggcggcgcgggcctggcgcgtggttacctgaacaaaccagagctgactgcggagaagttcgttgccaacccgttccgtccaggcgaacgtatgtacaaaactggtgacctggttaagtggcgtaccgatggcaccatcgaatatatcggccgcgcggacgaacaggtaaaagtccgtggttatcgtatcgaaatcggtgaaatcgaatctgccgttctggcataccaaggtatcgatcaagcggttgtggtggctcgtgatgatgatgcaaccgcaggttcgtacctgtgtgcttacttcgttgctgcaaccgcggttagcgtttccggtctgcgttctcatctggccaaagaactgccggcttatatgattccgagctactttgtggaactggatcagctgcctctgtccgcgaacggtaaagttgatcgtaaagcactgccgaaaccgcaggcggccgc

SEQ ID NO: 238 - protein, 758 aa, Artificial Sequence
  Description of Artificial Sequence: Synthetic polypeptide
AYEQKTTLPKKEAAFAKAFQPTQYRFSLNRTLTKQLGTIASQNQVTLSTVIQTIWGVLLQKYNAAHDVLFGSVVSGRPTDIVGIDKMVGLFINTIPFRVQAKAGQTFSELLQAVHKRTLQSQPYEHVPLYDIQTQSVLKQELIDHLLVIENYPLVEALQKKALNQQIGFTITAVEMFEPTNYDLTVMVMPKEELAFRFDYNAALFDEQVVQKLAGHLQQIADCVANNSGVELCQIPLLTEAETSQLLAKFNDTAVSYALDKTLHQLFEEQVDKTPDQAALLFSEQSLTYSELNERANRLARVLRAKGVGPDRLVAIMAERSPEMVIGILGILKAGGAYVPVDPGYPQERIQYLLEDSNAALLLSQAHLLPLLAQVSSELPECLDLNAELDAGLSGSNLPAVNQPTDLAYVIYTSGTTGKPKGVMIPHQGIVNCLQWRRDEYGFGPSDKALQVFSFAFDGFVASLFAPLLGGATCVLPQEAAAKDPVALKKLMAATEVTHYYGVPSLFQAILDCSTTTDFNQLRCVTLGGEKLPVQLVQKTKEKHPAIEINNEYGPTENSVVTTISRSIEAGQAITIGRPLANVQVYIVDEQHHLQPIGVVGELCIGGAGLARGYLNKPELTAEKFVANPFRPGERMYKTGDLVKWRTDGTIEYIGRADEQVKVRGYRIEIGEIESAVLAYQGIDQAVVVARDDDATAGSYLCAYFVAATAVSVSGLRSHLAKELPAYMIPSYFVELDQLPLSANGKVDRKALPKPQAA

SEQ ID NO: 239 - DNA, 2272 bp, Artificial Sequence
  Description of Artificial Sequence: Synthetic polynucleotide
aagcttatgagcagaaaaccactctgccaaaaaaagaagccgccttcgcaaaagcgtttcagccgacccagtaccgtttctcgctgaaccgtaccctgactaaacagctgggcactatcgcgagccagaaccaggtgaccctgtctactgttattcagaccatctggggtgtgctgctgcagaaatataacgcggcccatgatgttctgtttggttctgtcgtgtccggtcgtccaaccgatattgtaggcatcgataaaatggttggtctgttcattaacactatcccgttccgtgtccaggctaaagcgggccagactttttcagaactgctgcaggccgtacacaaacgtaccctgcagtcccagccgtatgaacacgtaccgctgtatgatattcagactcagtctgttttaaagcaggaactgattgatcacctgctggtaattgaaaactacccgctggtggaggcactgcagaaaaaagcgctgaaccagcagatcggcttcaccattactgccgtagaaatgtttgaaccgaccaactacgatctgaccgttatggttatgccgaaagaagaacttgcattccgttttgattataacgcagccctgttcgacgaacaggtggttcagaaactagcgggccacctgcagcagatcgcagactgcgttgcgaacaactccggtgtggaactgtgtcaaattccgctgctgaccgatcgcgaacgcgaattcctgctgaccggtctgaacccgcctgctcaggctcatgaaactaaaccgctgacttactggttcaaagaagctgtaaacgctaacccggacgcgccagctctcacctatagcggtcaaacgctttcttaccgtgaactcgacgaagaagctaaccgtatcgctcgtcgtctgcagaagcacggcgcgggcaaaggctctgttgtggccctgtacaccaaacgtagtctggaactggttatcggcatcttgggtgtgctgaaagcgggcgctgcatacctgccagtagacccgaaactgccggaagatcgtatcagttacatgctggcagactccgctgccgcatgcctgctgacccatcaggagatgaaggaacaggcagccgaactgccgtacaccggtactacgctgttcattgatgatcagacccgctttgaagaacaggcgagcgatccggcaacggctattgacccgaacgaccctgcatacatcatgtacacctccggtaccaccggcaaaccgaaaggtaacatcaccacccacgcgaacattcagggcctggtcaaacatgttgactacatggcgttttctgatcaggacaccttcctgagcgtatctaactatgctttcgatgcattcactttcgacttctatgcctctatgctgaacgcggctcgccttatcatcgcggatgaacataccctgctggacacagagcgtctgactgacctgattctgcaggagaacgtgaacgtaatgtttgcaaccacagcactgttcaacctgctgaccgacgctggtgaagactggatgaaaggtctgcgttgtatcctgtttggtggcgaacgcgcgagtgtcccgcacgtgcgtaaagccctccgcatcatgggcccgggcaaactgatcaactgctacggccctaccgaaggtaccgttttcgcgaccgcacatgtagttcatgacctgccggattccattagctccctgccgattggcaaaccgatcagcaacgcatctgtttacattctgaacgaacagtctcagctgcagccgttcggtgccgttggcgaactgtgcattagcggtatgggggtatctaaaggctacgttaaccgtgctgatctcaccaaagaaaaattcatcgaaaacccatttaaaccgggtgaaaccctgtaccgcaccggtgatctggctcgttggctgccagatggtaccatcgaatacgcgggccgtatcgacgatcaggtaaaaatccgtggccaccgcatcgaactggaggaaatcgaaaagcaactgcaggaatacccgggcgtgaaagatgcggttgttgttgctgatcgccacgagagcggtgatgcatcaatcaatgcatacctggtaaaccgtacacaactgtccgcagaagatgtaaaagctcacctgaaaaaacaactcccggcttacatggtcccgcagactttcacgttcttggatgaactgccgctgaccacaaacggcaaagttaacaaacgcctgctgcccaaaccggacgcggccgc

SEQ ID NO: 240 - protein, 756 aa, Artificial Sequence
  Description of Artificial Sequence: Synthetic polypeptide
AYEQKTTLPKKEAAFAKAFQPTQYRFSLNRTLTKQLGTIASQNQVTLSTVIQTIWGVLLQKYNAAHDVLFGSVVSGRPTDIVGIDKMVGLFINTIPFRVQAKAGQTFSELLQAVHKRTLQSQPYEHVPLYDIQTQSVLKQELIDHLLVIENYPLVEALQKKALNQQIGFTITAVEMFEPTNYDLTVMVMPKEELAFRFDYNAALFDEQVVQKLAGHLQQIADCVANNSGVELCQIPLLTDREREFLLTGLNPPAQAHETKPLTYWFKEAVNANPDAPALTYSGQTLSYRELDEEANRIARRLQKHGAGKGSVVALYTKRSLELVIGILGVLKAGAAYLPVDPKLPEDRISYMLADSAAACLLTHQEMKEQAAELPYTGTTLFIDDQTRFEEQASDPATAIDPNDPAYIMYTSGTTGKPKGNITTHANIQGLVKHVDYMAFSDQDTFLSVSNYAFDAFTFDFYASMLNAARLIIADEHTLLDTERLTDLILQENVNVMFATTALFNLLTDAGEDWMKGLRCILFGGERASVPHVRKALRIMGPGKLINCYGPTEGTVFATAHVVHDLPDSISSLPIGKPISNASVYILNEQSQLQPFGAVGELCISGMGVSKGYVNRADLTKEKFIENPFKPGETLYRTGDLARWLPDGTIEYAGRIDDQVKIRGHRIELEEIEKQLQEYPGVKDAVVVADRHESGDASINAYLVNRTQLSAEDVKAHLKKQLPAYMVPQTFTFLDELPLTTNGKVNKRLLPKPDAA

SEQ ID NO: 241 - DNA, 2272 bp, Artificial Sequence
  Description of Artificial Sequence: Synthetic polynucleotide
aagcttatgagcagaaaaccactctgccaaaaaaagaagccgccttcgcaaaagcgtttcagccgacccagtaccgtttctcgctgaaccgtaccctgactaaacagctgggcactatcgcgagccagaaccaggtgaccctgtctactgttattcagaccatctggggtgtgctgctgcagaaatataacgcggcccatgatgttctgtttggttctgtcgtgtccggtcgtccaaccgatattgtaggcatcgataaaatggttggtctgttcattaacactatcccgttccgtgtccaggctaaagcgggccagactttttcagaactgctgcaggccgtacacaaacgtaccctgcagtcccagccgtatgaacacgtaccgctgtatgatattcagactcagtctgttttaaagcaggaactgattgatcacctgctggtaattgaaaactacccgctggtggaggcactgcagaaaaaagcgctgaaccagcagatcggcttcaccattactgccgtagaaatgtttgaaccgaccaactacgatctgaccgttatggttatgccgaaagaagaacttgcattccgttttgattataacgcagccctgttcgacgaacaggtggttcagaaactagcgggccacctgcagcagatcgcagactgcgttgcgaacaactccggtgtggaactgtgtcaaattccgctgctgaccgaagcggaaaccagccagctgcttgcaaaactgaacccgcctgctcaggctcatgaaactaaaccgctgacttactggttcaaagaagctgtaaacgctaacccggacgcgccagctctcacctatagcggtcaaacgctttcttaccgtgaactcgacgaagaagctaaccgtatcgctcgtcgtctgcagaagcacggcgcgggcaaaggctctgttgtggccctgtacaccaaacgtagtctggaactggttatcggcatcttgggtgtgctgaaagcgggcgctgcatacctgccagtagacccgaaactgccggaagatcgtatcagttacatgctggcagactccgctgccgcatgcctgctgacccatcaggagatgaaggaacaggcagccgaactgccgtacaccggtactacgctgttcattgatgatcagacccgctttgaagaacaggcgagcgatccggcaacggctattgacccgaacgaccctgcatacatcatgtacacctccggtaccaccggcaaaccgaaaggtaacatcaccacccacgcgaacattcagggcctggtcaaacatgttgactacatggcgttttctgatcaggacaccttcctgagcgtatctaactatgctttcgatgcattcactttcgacttctatgcctctatgctgaacgcggctcgccttatcatcgcggatgaacataccctgctggacacagagcgtctgactgacctgattctgcaggagaacgtgaacgtaatgtttgcaaccacagcactgttcaacctgctgaccgacgctggtgaagactggatgaaaggtctgcgttgtatcctgtttggtggcgaacgcgcgagtgtcccgcacgtgcgtaaagccctccgcatcatgggcccgggcaaactgatcaactgctacggccctaccgaaggtaccgttttcgcgaccgcacatgtagttcatgacctgccggattccattagctccctgccgattggcaaaccgatcagcaacgcatctgtttacattctgaacgaacagtctcagctgcagccgttcggtgccgttggcgaactgtgcattagcggtatgggggtatctaaaggctacgttaaccgtgctgatctcaccaaagaaaaattcatcgaaaacccatttaaaccgggtgaaaccctgtaccgcaccggtgatctggctcgttggctgccagatggtaccatcgaatacgcgggccgtatcgacgatcaggtaaaaatccgtggccaccgcatcgaactggaggaaatcgaaaagcaactgcaggaatacccgggcgtgaaagatgcggttgttgttgctgatcgccacgagagcggtgatgcatcaatcaatgcatacctggtaaaccgtacacaactgtccgcagaagatgtaaaagctcacctgaaaaaacaactcccggcttacatggtcccgcagactttcacgttcttggatgaactgccgctgaccacaaacggcaaagttaacaaacgcctgctgcccaaaccggacgcggccgc

SEQ ID NO: 242 - protein, 756 aa, Artificial Sequence
  Description of Artificial Sequence: Synthetic polypeptide
AYEQKTTLPKKEAAFAKAFQPTQYRFSLNRTLTKQLGTIASQNQVTLSTVIQTIWGVLLQKYNAAHDVLFGSVVSGRPTDIVGIDKMVGLFINTIPFRVQAKAGQTFSELLQAVHKRTLQSQPYEHVPLYDIQTQSVLKQELIDHLLVIENYPLVEALQKKALNQQIGFTITAVEMFEPTNYDLTVMVMPKEELAFRFDYNAALFDEQVVQKLAGHLQQIADCVANNSGVELCQIPLLTEAETSQLLAKLNPPAQAHETKPLTYWFKEAVNANPDAPALTYSGQTLSYRELDEEANRIARRLQKHGAGKGSVVALYTKRSLELVIGILGVLKAGAAYLPVDPKLPEDRISYMLADSAAACLLTHQEMKEQAAELPYTGTTLFIDDQTRFEEQASDPATAIDPNDPAYIMYTSGTTGKPKGNITTHANIQGLVKHVDYMAFSDQDTFLSVSNYAFDAFTFDFYASMLNAARLIIADEHTLLDTERLTDLILQENVNVMFATTALFNLLTDAGEDWMKGLRCILFGGERASVPHVRKALRIMGPGKLINCYGPTEGTVFATAHVVHDLPDSISSLPIGKPISNASVYILNEQSQLQPFGAVGELCISGMGVSKGYVNRADLTKEKFIENPFKPGETLYRTGDLARWLPDGTIEYAGRIDDQVKIRGHRIELEEIEKQLQEYPGVKDAVVVADRHESGDASINAYLVNRTQLSAEDVKAHLKKQLPAYMVPQTFTFLDELPLTTNGKVNKRLLPKPDAA
